(19) United States
(12) Patent Application Publication
(10) Pub. No.: US 2023/0124851 A1
(43) Pub. Date: Apr. 20, 2023

(54) B7H3 SINGLE DOMAIN ANTIBODIES AND THERAPEUTIC COMPOSITIONS THEREOF

(71) Applicant: Inhibrx, lnc., La Jolla, CA (US)

(72) Inventors: Brendan P. ECKELMAN, La Jolla, CA (US); Michael D. KAPLAN, La joiia, CA (US); Katelyn M. WILLIS, La Jolla, CA (US); Kyle S. JONES, La Jolla, CA (US); Angelica N. SANABRIA, La Jolla, CA (US); Sydney A. BARNES, La Jolla, CA (US); Margaret E. HAERR, La Joiia, CA (US); John C. TIMMER, La Jolla, CA (US)

(73) Assignee: Inhibrx, lnc., La Jolla, CA (US)

(21) Appl. No.: 17/283,902

(22) PCT Filed: Oct. 9, 2019
(86) PCT No.: PCT/US2019/055427

§ 371 Date: Apr. 8, 2021

Related U.S. Application Data
(60) Provisional application No. 62/877,812, filed on Jul. 23, 2019.
(60) Provisional application No. 62/832,274, filed on Apr. 10, 2019.
(60) Provisional application No. 62/744,640, filed on Oct. 11, 2018.

(51) Int. Cl. C07K 16/28; A61P 35/00

(52) U.S. Cl. CPC C07K 16/2827; C07K 16/2809; A61P 35/00; C07K 2317/565; C07K 2317/24; C07K 2317/52; C07K 2317/31

(57) ABSTRACT

Provided herein are binding polypeptides that specifically bind B7H3. More specifically, provided herein are fusion proteins, including multivalent and/or multispecific constructs and chimeric antigen receptors, that bind B7H3. Also provided are pharmaceutical compositions containing the polypeptides, nucleic acid molecules encoding the polypeptides and vectors and cells thereof, and methods of use and uses of the provided B7H3 binding polypeptides for treating diseases and conditions, such as cancer.

### CROSS-REFERENCE TO RELATED APPLICATIONS

[0001] This application is a national stage application under 35 U.S.C. § 371 of International Application No. PCT/US2019/055427, filed on Oct. 9, 2019, which claims priority to U.S. provisional applications: 62/744,640, filed Oct. 11, 2018, entitled “B7H3 SINGLE DOMAIN ANTIBODIES AND THERAPEUTIC COMPOSITIONS THEREOF”; 62/832,274, filed Apr. 10, 2019, entitled “B7H3 SINGLE DOMAIN ANTIBODIES AND THERAPEUTIC COMPOSITIONS THEREOF”; and 62/877,812 filed Jul. 23, 2019, entitled “B7H3 SINGLE DOMAIN ANTIBODIES AND THERAPEUTIC COMPOSITIONS THEREOF” the contents of which are incorporated by reference in their entirety for all purposes.

### INCORPORATION BY REFERENCE OF SEQUENCE LISTING

[0002] The present application is being filed along with a Sequence Listing in electronic format. The Sequence Listing is provided as a file entitled 744952000400SubSeqList.TXT, created Jan. 10, 2022, which is 676,515 bytes in size. The information in the electronic format of the Sequence Listing is incorporated by reference in its entirety.

### FIELD

[0003] This disclosure generally provides binding polypeptides that specifically bind B7H3. More specifically, the disclosure relates to fusion proteins, including multivalent and/or multispecific constructs and chimeric antigen receptors, that bind at least B7H3. The disclosure also provides nucleic acid molecules encoding the polypeptides and vectors and cells thereof, and methods of use and uses of the provided B7H3 binding polypeptides for treating diseases and conditions, such as cancer.

### BACKGROUND

[0004] B7H3 is a member of the B7 family of immune cell modulating molecules. It is expressed on the surface of a wide variety of tumor cells and tumor vasculature, and its expression has been associated with poor prognosis in a variety of cancers. The expression of B7H3 on a variety of cancers in humans, including solid tumors, makes B7H3 a desirable therapeutic target. Improved therapeutic molecules and agents targeting B7H3 are needed. Provided herein are embodiments that meet such needs.

### SUMMARY

[0005] Provided herein is a B7H3-binding polypeptide construct, comprising at least one heavy chain only variable domain (B7H3 VHH domain) that specifically binds B7H3. In some embodiments, the B7H3-binding polypeptide construct further comprises one or more additional binding domain that binds to a target other than B7H3.

[0006] Provided herein is a B7H3-binding construct, comprising at least one heavy chain only variable domain (B7H3 VHH domain) comprising a complementarity determining region 1 (CDR1) comprising an amino acid sequence selected from the group consisting of SEQ ID NO: 115, 116, 117, 118, 119, 120, 121, 122, 123, 124, 125, 126, 127, 128, 129, 130, 131, 132, 133, 134, 135, 136, 137, 138, 139, 140, 141, 142, 143, 144 and 145; a complementarity determining region 2 (CDR2) comprising an amino acid sequence selected from the group consisting of SEQ ID NO: 146, 147, 148, 149, 150, 151, 152, 153, 154, 155, 156, 157, 158, 159, 160, 161, 162, 163, 164, 165, 166 and 167; and a complementarity determining region 3 (CDR3) comprising an amino acid sequence selected from the group consisting of SEQ ID NO: 168, 169, 170, 171, 172, 173, 174, 175, 176, 177, 178, 179, 180, 181, 182, 183, 184, 185, 186, 187, 188, 189, and 483-488. In some embodiments, the B7H3-binding polypeptide construct further comprises one or more additional binding domain that binds to a target other than B7H3.

[0007] In some embodiments, the B7H3-binding polypeptide construct is a dimer.

[0008] In some embodiments, the B7H3 has the sequence set forth in SEQ ID NO:190 or a mature form thereof lacking the signal sequence. In some embodiments, the B7H3 is a human B7H3.

[0009] In some embodiments, the at least one B7H3 VHH domain is humanized. In some embodiments, the B7H3 VHH is a camelid VHH. In some embodiments, the B7H3 VHH is a humanized form of a camelid VHH.

[0010] In some embodiments, the one or more additional binding domains binds to an activating receptor on an immune cell. In some embodiments, the immune cell is a T cell. In some embodiments, the activating receptor is CD3 (CD3ε ). In some embodiments, the binding polypeptide construct is bispecific for B7H3 and CD3. In some embodiments, the immune cell is a Natural Killer (NK) cell. In some embodiments, the activating receptor is CD16 (CD16a). In some embodiments, the B7H3-bnding polypeptide construct is bispecific for B7H3 and CD16a.

[0011] In some embodiments, the one or more additional binding domain binds to a cytokine receptor. In some embodiments, the one or more additional binding domain is a cytokine or is a truncated fragment or variant thereof capable of binding to the cytokine receptor. In some embodiments, the cytokine is an interferon, or is a truncated fragment or variant of an interferon. In some embodiments, the interferon is a type I interferon, a type II interferon, a truncated fragment or variant of a type I interferon, or a truncated fragment of variant of a type II interferon. In some embodiments, the interferon is selected from a type I interferon that is an IFN-alpha or an IFN-beta, or is a truncated fragment or variant thereof or a type II interferon that is an or IFN-gamma or a truncated fragment or variant thereof.

[0012] In some embodiments, the one or more additional binding domain comprises an antibody or antigen-binding fragment thereof. In some embodiments, the one or more additional binding domain is monovalent. In some embodiments, the antibody or antigen-binding fragment thereof is an Fv, a disulfide-stabilized Fv (dsFv), scFv, a Fab, a single domain antibody (sdAb), a VNAR, or a VHH.

[0013] In some of any of the provided embodiments, the polypeptide comprises an immunoglobulin Fc region. In some embodiments, the polypeptide comprises an immunoglobulin Fc region that links the at least one VHH domain and the one or more additional binding domain. In some embodiemnts, the B7H3-binding polypeptide construct is a dimer. In some embodiments, the Fc region is a homodimeric Fc region.

[0014] In some of any of the provided embodiments, the Fc region comprises the sequence of amino acids set forth in any of SEQ ID NOS: 198, 200, 201, 202 or 203, or a sequence of amino acids that exhibits at least 85%, 86%, 87%, 88%, 89%, 90%, 91%, 92%, 93%, 94%, 95%, 96%, 97%, 98%, or 99% sequence identity to any of SEQ ID NOS: 198, 200, 201, 202 or 203. In some embodiments, the Fc region is a human IgG1.

[0015] In some of any of the provided embodiments, the B7H3-binding polypeptide construct is a dimer. In some embodiments, the Fc region is a homodimeric Fc region.

[0016] In some of any of the provided embodiments, the Fc region is a human IgG1.

[0017] In some of any of the provided embodiments, the Fc region comprises the sequence of amino acids set forth in SEQ ID NO: 198 or a sequence of amino acids that exhibits at least 85%, 86%, 87%, 88%, 89%, 90%, 91%, 92%, 93%, 94%, 95%, 96%, 97%, 98%, or 99% sequence identity to SEQ ID NO: 198.

[0018] In some embodiments, the Fc region is a heterodimeric Fc region. In some embodiments, the Fc region exhibits effector function. In some embodiments, the Fc region comprises a polypeptide comprising one or more amino acid modification that reduces effector function and/or reduces binding to an effector molecule selected from an Fc gamma receptor or C1q. In some embodiments, the one or more amino acid modification is deletion of one or more of Glu233, Leu234 or Leu235.

[0019] In some of any of the provided embodiments, the Fc region comprises the sequence of amino acids set forth in SEQ ID NO: 199 or a sequence of amino acids that exhibits at least 85%, 86%, 87%, 88%, 89%, 90%, 91%, 92%, 93%, 94%, 95%, 96%, 97%, 98%, or 99% sequence identity to SEQ ID NO: 199.

[0020] In some embodiments, the at least one B7H3 VHH domain comprises the VHH domain sequence set forth in any of SEQ ID NOS: 1-114, 466, 467, 489, 490, or 492-518 or a sequence of amino acids that exhibits at least 85%, 86%, 87%, 88%, 89%, 90%, 91%, 92%, 93%, 94%, 95%, 96%, 97%, 98%, or 99% sequence identity to any of SEQ ID NOS: 1-114, 466, 467, 489, 490, or 492-518 and binds B7H3.

[0021] In some embodiments, the at least one B7H3 VHH domain comprises the VHH domain sequence set forth in any of SEQ ID NOS: 1, 8-35, 40, 41, 44, 56-110, 466, 467, 489, 490, or 492-518 or a sequence of amino acids that exhibits at least 85%, 86%, 87%, 88%, 89%, 90%, 91%, 92%, 93%, 94%, 95%, 96%, 97%, 98%, or 99% sequence identity to any of SEQ ID NOS: 1, 8-35, 40, 41, 44, 56-110, 466, 467, 489, 490, or 492-518 and binds B7H3.

[0022] In some of any of the provided embodiments, the at least one B7H3 domain comprises the sequence set forth in (i) SEQ ID NO:1, (ii) a humanized variant of SEQ ID NO:1, or (iii) a sequence of amino acids that exhibits at least 85%, 86%, 87%, 88%, 89%, 90%, 91%, 92%, 93%, 94%, 95%, 96%, 97%, 98%, or 99% sequence identity to SEQ ID NO:1, and binds B7H3. In some embodiments, the at least one B7H3 VHH domain comprises a CDR1 comprising an amino acid sequence selected from the group consisting of SEQ ID NO: 115, 116, 117, 118, 119, 120 and 121; a CDR2 comprising an amino acid sequence selected from the group consisting of SEQ ID NO: 146, 147, 148, 149, 150 and 151; and a CDR3 comprising an amino acid sequence selected from the group consisting of SEQ ID NO: 168 and 169. In some embodiments, the at least one B7H3 VHH domain comprises a CDR1, CDR2 and CDR3 set forth in SEQ ID NOS: 115, 146 and 168, respectively. In some embodiments, the at least one B7H3 VHH domain comprises a CDR1, CDR2 and CDR3 set forth in SEQ ID NOS: 115, 147 and 168, respectively. In some embodiments, the at least one B7H3 VHH domain comprises a CDR1, CDR2 and CDR3 set forth in SEQ ID NOS: 115, 148 and 168, respectively. In some embodiments, the at least one B7H3 VHH domain comprises a CDR1, CDR2 and CDR3 set forth in SEQ ID NOS: 115, 149 and 168, respectively. In some embodiments, the at least one B7H3 VHH domain comprises a CDR1, CDR2 and CDR3 set forth in SEQ ID NOS: 115, 150 and 168, respectively. In some embodiments, the at least one B7H3 VHH domain comprises a CDR1, CDR2 and CDR3 set forth in SEQ ID NOS: 116, 146 and 168, respectively. In some embodiments, the at least one B7H3 VHH domain comprises a CDR1, CDR2 and CDR3 set forth in SEQ ID NOS: 117, 146 and 168, respectively. In some embodiments, the at least one B7H3 VHH domain comprises a CDR1, CDR2 and CDR3 set forth in SEQ ID NOS: 118, 146 and 168, respectively. In some embodiments, the at least one B7H3 VHH domain comprises a CDR1, CDR2 and CDR3 set forth in SEQ ID NOS: 115, 146 and 169, respectively. In some embodiments, the at least one B7H3 VHH domain comprises a CDR1, CDR2 and CDR3 set forth in SEQ ID NOS: 119, 146 and 168, respectively. In some embodiments, the at least one B7H3 VHH domain comprises a CDR1, CDR2 and CDR3 set forth in SEQ ID NOS: 120, 146 and 168, respectively. In some embodiments, the at least one B7H3 VHH domain comprises a CDR1, CDR2 and CDR3 set forth in SEQ ID NOS: 115, 151 and 168, respectively. In some embodiments, the at least one B7H3 VHH domain comprises a CDR1, CDR2 and CDR3 set forth in SEQ ID NOS: 116, 147 and 168, respectively. In some embodiments, the at least one B7H3 VHH domain comprises a CDR1, CDR2 and CDR3 set forth in SEQ ID NOS: 118, 147 and 168, respectively. In some embodiments, the at least one B7H3 VHH domain comprises a CDR1, CDR2 and CDR3 set forth in SEQ ID NOS: 119, 147 and 168, respectively. In some embodiments, the at least one B7H3 VHH domain comprises a CDR1, CDR2 and CDR3 set forth in SEQ ID NOS: 116, 151 and 168, respectively. In some embodiments, the at least one B7H3 VHH domain comprises a CDR1, CDR2 and CDR3 set forth in SEQ ID NOS: 115, 146 and 168, respectively. In some embodiments, the at least one B7H3 VHH domain comprises a CDR1, CDR2 and CDR3 set forth in SEQ ID NOS: 121, 147 and 168, respectively. In some embodiments, the at least one B7H3 VHH domain comprises a CDR1, CDR2 and CDR3 set forth in SEQ ID NOS: 115, 146 and 168, respectively. In some embodiments, the at least one B7H3 VHH domain comprises a CDR1, CDR2 and CDR3 set forth in SEQ ID NOs: 119, 149 and 168, respectively. In some embodiments, the at least one B7H3 VHH domain comprises a CDR1, CDR2 and CDR3 set forth in SEQ ID NOS: 122, 151 and 168, respectively. In some embodiments, the at least one B7H3 VHH domain comprises the sequence of amino acids set forth in any one of SEQ ID NOs:2-34 and 467 or a sequence of amino acids that exhibits at least 85%, 86%, 87%, 88%, 89%, 90%, 91%, 92%, 93%, 94%, 95%, 96%, 97%, 98%, or 99% sequence identity to any one of SEQ ID NO:2-34 and 467, and binds B7H3. In some embodiments, the at least one B7H3 VHH domain comprises the sequence of amino acids set forth in any one of SEQ ID NOS: 2-34 and 467. In some embodiments, the at least one B7H3 VHH domain comprises the sequence of amino acids set forth in any one of SEQ ID NOs:8-34, 467, 489-490, and 492-497 or a sequence of amino acids that exhibits at least 85%, 86%, 87%, 88%, 89%, 90%, 91%, 92%, 93%, 94%, 95%, 96%, 97%, 98%, or 99% sequence identity to any one of SEQ ID NO: 8-34, 467, 489-490, and 492-497, and binds B7H3. In some embodiments, the at least one B7H3 VHH domain comprises the sequence of amino acids set forth in any one of SEQ ID NOS: 8-34, 467, 489-490, and 492-497.

[0023] In some of any of the provided embodiments, the at least one B7H3 VHH domain comprises the sequence set forth in (i) SEQ ID NO:35, (ii) a humanized variant of SEQ ID NO:35, or (iii) a sequence of amino acids that exhibits at least 85%, 86%, 87%, 88%, 89%, 90%, 91%, 92%, 93%, 94%, 95%, 96%, 97%, 98%, or 99% sequence identity to SEQ ID NO:35, and binds B7H3. In some embodiments, the at least one B7H3 VHH domain comprises a CDR1 comprising an amino acid sequence set forth in SEQ ID NO: 123; a CDR2 comprising an amino acid sequence selected from the group consisting of SEQ ID NO: 152 and 153; and a CDR3 comprising an amino acid sequence selected from the group consisting of SEQ ID NO: 170 and 171. In some embodiments, the at least one B7H3 VHH domain comprises a CDR1, CDR2 and CDR3 set forth in SEQ ID NOS: 123, 152 and 170, respectively. In some embodiments, the at least one B7H3 VHH domain comprises a CDR1, CDR2 and CDR3 set forth in SEQ ID NOS: 123, 152 and 171, respectively. In some embodiments, the at least one B7H3 VHH domain comprises a CDR1, CDR2 and CDR3 set forth in SEQ ID NOS: 123, 153 and 170, respectively. In some embodiments, the at least one B7H3 VHH domain comprises a CDR1, CDR2 and CDR3 set forth in SEQ ID NOS: 123, 153 and 171, respectively. In some embodiments, the at least one B7H3 VHH domain comprises the sequence of amino acids set forth in any one of SEQ ID NOs:36-43 or a sequence of amino acids that exhibits at least 85%, 86%, 87%, 88%, 89%, 90%, 91%, 92%, 93%, 94%, 95%, 96%, 97%, 98%, or 99% sequence identity to any one of SEQ ID NO:36-43, and binds B7H3. In some embodiments, the at least one B7H3 VHH domain comprises the sequence of amino acids set forth in any one of SEQ ID NOS: 36-43. In some embodiments, the at least one B7H3 VHH domain comprises the sequence of amino acids set forth in any one of SEQ ID NOs:40, 41, or 498-503 or a sequence of amino acids that exhibits at least 85%, 86%, 87%, 88%, 89%, 90%, 91%, 92%, 93%, 94%, 95%, 96%, 97%, 98%, or 99% sequence identity to any one of SEQ ID NO: 40, 41, or 498-503, and binds B7H3. In some embodiments, the at least one B7H3 VHH domain comprises the sequence of amino acids set forth in any one of SEQ ID NOS: 40, 41, or 498-503.

[0024] In some of any of the provided embodiments, the at least one B7H3 VHH domain comprises the sequence set forth in (i) SEQ ID NO:44 (ii) a humanized variant of SEQ ID NO:44, or (iii) a sequence of amino acids that exhibits at least 85%, 86%, 87%, 88%, 89%, 90%, 91%, 92%, 93%, 94%, 95%, 96%, 97%, 98%, or 99% sequence identity to SEQ ID NO:44, and binds B7H3. In some embodiments, the at least one B7H3 VHH domain comprises a CDR1 comprising an amino acid sequence selected from the group consisting of SEQ ID NO: 124, 125, 126, 127, 128, 129, 130, 131, 132, or 133; a CDR2 comprising an amino acid sequence set forth in SEQ ID NO: 154; and a CDR3 comprising an amino acid sequence selected from the group consisting of SEQ ID NO: 172, 173, 174, 175, 176, 177, 178, 179, 180, 181, 182 and 183. In some embodiments, the at least one B7H3 VHH domain comprises a CDR1, CDR2 and CDR3 set forth in SEQ ID NOS: 124, 154 and 172, respectively. In some embodiments, the at least one B7H3 VHH domain comprises a CDR1, CDR2 and CDR3 set forth in SEQ ID NOS: 124, 154 and 173, respectively. In some embodiments, the at least one B7H3 VHH domain comprises a CDR1, CDR2 and CDR3 set forth in SEQ ID NOS: 124, 154 and 174, respectively. In some embodiments, the at least one B7H3 VHH domain comprises a CDR1, CDR2 and CDR3 set forth in SEQ ID NOS: 124, 154 and 175, respectively. In some embodiments, the at least one B7H3 VHH domain comprises a CDR1, CDR2 and CDR3 set forth in SEQ ID NOS: 125, 154 and 173, respectively. In some embodiments, the at least one B7H3 VHH domain comprises a CDR1, CDR2 and CDR3 set forth in SEQ ID NOS: 126, 154 and 173, respectively. In some embodiments, the at least one B7H3 VHH domain comprises a CDR1, CDR2 and CDR3 set forth in SEQ ID NOS: 127, 154 and 173, respectively. In some embodiments, the at least one B7H3 VHH domain comprises a CDR1, CDR2 and CDR3 set forth in SEQ ID NOS: 128, 154 and 173, respectively. In some embodiments, the at least one B7H3 VHH domain comprises a CDR1, CDR2 and CDR3 set forth in SEQ ID NOS: 129, 154 and 173, respectively. In some embodiments, the at least one B7H3 VHH domain comprises a CDR1, CDR2 and CDR3 set forth in SEQ ID NOS: 130, 154 and 173, respectively. In some embodiments, the at least one B7H3 VHH domain comprises a CDR1, CDR2 and CDR3 set forth in SEQ ID NOS: 131, 154 and 173, respectively. In some embodiments, the at least one B7H3 VHH domain comprises a CDR1, CDR2 and CDR3 set forth in SEQ ID NOS: 124, 154 and 176, respectively. In some embodiments, the at least one B7H3 VHH domain comprises a CDR1, CDR2 and CDR3 set forth in SEQ ID NOS: 124, 154 and 177, respectively. In some embodiments, the at least one B7H3 VHH domain comprises a CDR1, CDR2 and CDR3 set forth in SEQ ID NOS: 124, 154 and 178, respectively. In some embodiments, the at least one B7H3 VHH domain comprises a CDR1, CDR2 and CDR3 set forth in SEQ ID NOS: 124, 154 and 179, respectively. In some embodiments, the at least one B7H3 VHH domain comprises a CDR1, CDR2 and CDR3 set forth in SEQ ID NOS: 124, 154 and 180, respectively. In some embodiments, the at least one B7H3 VHH domain comprises a CDR1, CDR2 and CDR3 set forth in SEQ ID NOS: 124, 154 and 181, respectively. In some embodiments, the at least one B7H3 VHH domain comprises a CDR1, CDR2 and CDR3 set forth in SEQ ID NOS: 124, 154 and 182, respectively. In some embodiments, the at least one B7H3 VHH domain comprises a CDR1, CDR2 and CDR3 set forth in SEQ ID NOS: 124, 154 and 183, respectively. In some embodiments, the at least one B7H3 VHH domain comprises a CDR1, CDR2 and CDR3 set forth in SEQ ID NOS: 126, 154 and 176, respectively. In some embodiments, the at least one B7H3 VHH domain comprises a CDR1, CDR2 and CDR3 set forth in SEQ ID NOS: 124, 154 and 179, respectively. In some embodiments, the at least one B7H3 VHH domain comprises a CDR1, CDR2 and CDR3 set forth in SEQ ID NOS: 124, 154 and 182, respectively. In some embodiments, the at least one B7H3 VHH domain comprises a CDR1, CDR2 and CDR3 set forth in SEQ ID NOS: 132, 154 and 176, respectively; or SEQ ID NOS: 133, 154 and 173, respectively. In some embodiments, the at least one B7H3 VHH domain comprises the sequence of amino acids set forth in any one of SEQ ID NOs:45-91 and 466 or a sequence of amino acids that exhibits at least 85%, 86%, 87%, 88%, 89%, 90%, 91%, 92%, 93%, 94%, 95%, 96%, 97%, 98%, or 99% sequence identity to any one of SEQ ID NO:45-91 and 466, and binds B7H3. In some embodiments, the at least one B7H3 VHH domain comprises the sequence of amino acids set forth in any one of SEQ ID NOS: 45-91 and 466. In some embodiments, the at least one B7H3 VHH domain comprises the sequence of amino acids set forth in any one of SEQ ID NOs:56-91, 466, and 504-514 or a sequence of amino acids that exhibits at least 85%, 86%, 87%, 88%, 89%, 90%, 91%, 92%, 93%, 94%, 95%, 96%, 97%, 98%, or 99% sequence identity to any one of SEQ ID NO: 56-91, 466, and 504-514, and binds B7H3. In some embodiments, the at least one B7H3 VHH domain comprises the sequence of amino acids set forth in any one of SEQ ID NOS: 56-91, 466, and 504-514.

[0025] In some of any of the provided embodiments, the at least one B7H3 VHH domain comprises the sequence set forth in (i) SEQ ID NO:105 (ii) a humanized variant of SEQ ID NO:105, or (iii) a sequence of amino acids that exhibits at least 85%, 86%, 87%, 88%, 89%, 90%, 91%, 92%, 93%, 94%, 95%, 96%, 97%, 98%, or 99% sequence identity to SEQ ID NO:105, and binds B7H3. In some embodiments, the at least one B7H3 VHH domain comprises a CDR1 comprising an amino acid sequence set forth in SEQ ID NO: 145; a CDR2 comprising an amino acid sequence set forth in SEQ ID NO: 167; and a CDR3 comprising an amino acid sequence set forth in SEQ ID NO: 488. In some embodiments, the at least one B7H3 VHH domain comprises the sequence of amino acids set forth in any one of SEQ ID NOs:106-109 or a sequence of amino acids that exhibits at least 85%, 86%, 87%, 88%, 89%, 90%, 91%, 92%, 93%, 94%, 95%, 96%, 97%, 98%, or 99% sequence identity to any one of SEQ ID NO:106-109, and binds B7H3. In some embodiments, the at least one B7H3 VHH domain comprises the sequence of amino acids set forth in any one of SEQ ID NOS: 106-109.

[0026] In some of any of the provided embodiments, the at least one B7H3 VHH domain comprises the sequence set forth in (i) SEQ ID NO:110 (ii) a humanized variant of SEQ ID NO:110, or (iii) a sequence of amino acids that exhibits at least 85%, 86%, 87%, 88%, 89%, 90%, 91%, 92%, 93%, 94%, 95%, 96%, 97%, 98%, or 99% sequence identity to SEQ ID NO:110, and binds B7H3. In some embodiments, the at least one B7H3 VHH domain comprises a CDR1 comprising an amino acid sequence set forth in SEQ ID NO: 139; a CDR2 comprising an amino acid sequence set forth in SEQ ID NO: 161; and a CDR3 comprising an amino acid sequence set forth in SEQ ID NO: 189. In some embodiments, the at least one B7H3 VHH domain comprises the sequence of amino acids set forth in any one of SEQ ID NOs:111-114 or a sequence of amino acids that exhibits at least 85%, 86%, 87%, 88%, 89%, 90%, 91%, 92%, 93%, 94%, 95%, 96%, 97%, 98%, or 99% sequence identity to any one of SEQ ID NO:111-114, and binds B7H3. In some embodiments, the at least one B7H3 VHH domain comprises the sequence of amino acids set forth in any one of SEQ ID NOS: 111-114. In some embodiments, the at least one B7H3 VHH domain comprises the sequence of amino acids set forth in any one of SEQ ID NOs:515-518 or a sequence of amino acids that exhibits at least 85%, 86%, 87%, 88%, 89%, 90%, 91%, 92%, 93%, 94%, 95%, 96%, 97%, 98%, or 99% sequence identity to any one of SEQ ID NO: 515-518, and binds B7H3. In some embodiments, the at least one B7H3 VHH domain comprises the sequence of amino acids set forth in any one of SEQ ID NOS: 515-518.

[0027] In some of any of the provided embodiments, the at least one B7H3 VHH domain comprises the sequence set forth in (i) SEQ ID NO:92, 93, 94, 95, 96, 97, 98, 99, 100, 101, 102, 103 or 104 (ii) a humanized variant of SEQ ID NO: 92, 93, 94, 95, 96, 97, 98, 99, 100, 101, 102, 103 or 104, or (iii) a sequence of amino acids that exhibits at least 85%, 86%, 87%, 88%, 89%, 90%, 91%, 92%, 93%, 94%, 95%, 96%, 97%, 98%, or 99% sequence identity to SEQ ID NO: 92, 93, 94, 95, 96, 97, 98, 99, 100, 101, 102, 103 or 104, and binds B7H3. In some embodiments, the at least one B7H3 VHH domain comprises a CDR1, CDR2 and CDR3 set forth in SEQ ID NOS:134, 155 and 184, respectively. In some embodiments, the at least one B7H3 VHH domain comprises a CDR1, CDR2 and CDR3 set forth in SEQ ID NOS:135, 156 and 168, respectively. In some embodiments, the at least one B7H3 VHH domain comprises a CDR1, CDR2 and CDR3 set forth in SEQ ID NOS:136, 157 and 185, respectively. In some embodiments, the at least one B7H3 VHH domain comprises a CDR1, CDR2 and CDR3 set forth in SEQ ID NOS:137, 158 and 186, respectively. In some embodiments, the at least one B7H3 VHH domain comprises a CDR1, CDR2 and CDR3 set forth in SEQ ID NOS: 138, 159 and 187, respectively. In some embodiments, the at least one B7H3 VHH domain comprises a CDR1, CDR2 and CDR3 set forth in SEQ ID NOS:138, 160 and 188, respectively. In some embodiments, the at least one B7H3 VHH domain comprises a CDR1, CDR2 and CDR3 set forth in SEQ ID NOS:139, 161 and 189, respectively. In some embodiments, the at least one B7H3 VHH domain comprises a CDR1, CDR2 and CDR3 set forth in SEQ ID NOS:140, 162 and 483, respectively. In some embodiments, the at least one B7H3 VHH domain comprises a CDR1, CDR2 and CDR3 set forth in SEQ ID NOS:141, 163 and 484, respectively. In some embodiments, the at least one B7H3 VHH domain comprises a CDR1, CDR2 and CDR3 set forth in SEQ ID NOS: 139, 161 and 189, respectively. In some embodiments, the at least one B7H3 VHH domain comprises a CDR1, CDR2 and CDR3 set forth in SEQ ID NOS:142, 164 and 485, respectively. In some embodiments, the at least one B7H3 VHH domain comprises a CDR1, CDR2 and CDR3 set forth in SEQ ID NOS:143, 165 and 486, respectively. In some embodiments, the at least one B7H3 VHH domain comprises a CDR1, CDR2 and CDR3 set forth in SEQ ID NOS:144, 166 and 487, respectively. In some embodiments, the at least one B7H3 VHH domain is set forth in SEQ ID NO: 92, 93, 94, 95, 96, 97, 98, 99, 100, 101, 102, 103 or 104.

[0028] In some embodiments, a B7H3 VHH domain comprises the VHH domain sequence set forth in SEQ ID NO: 1. In some embodiments, a B7H3 VHH domain comprises the VHH domain sequence set forth in SEQ ID NO:8. In some embodiments, a B7H3 VHH domain comprises the VHH domain sequence set forth in SEQ ID NO: 43. In some embodiments, a B7H3 VHH domain comprises the VHH domain sequence set forth in SEQ ID NO: 503. In some embodiments, a B7H3 VHH domain comprises the VHH domain sequence set forth in SEQ ID NO: 67. In some embodiments, a B7H3 VHH domain comprises the VHH domain sequence set forth in SEQ ID NO: 85. In some embodiments, a B7H3 VHH domain comprises the VHH domain sequence set forth in SEQ ID NO: 455. In some embodiments, a B7H3 VHH domain comprises the VHH domain sequence set forth in SEQ ID NO: 456. In some embodiments, a B7H3 VHH domain comprises the VHH domain sequence set forth in SEQ ID NO: 466. In some embodiments, a B7H3 VHH domain comprises the VHH domain sequence set forth in SEQ ID NO: 467.

[0029] In some of any of the provided embodiments, a B7H3 VHH domain may comprise additional amino acids at its N- and/or C-terminal, such as for linkage to another amino acid sequence, such as another polypeptide. In some of any of the provided embodiments, a B7H3 VHH domain may comprise a flexible linker, such as a glycine linker or a linker composed predominately of the amino acids Glycine and Serine, denoted as GS-linkers herein. Such linkers of the present disclosure can be of various lengths, for example, 5, 6, 7, 8, 9, 10, 11, 12, 13, 14, 15, 16, 17, 18, 19, 20 amino acids in length. In some embodiments, the linker comprises an amino acid sequence selected from the group consisting of GGSGGS, i.e., (GGS)₂ (SEQ ID NO: 191); GGSGGSGGS, i.e., (GGS)₃ (SEQ ID NO: 192); GGSGGSGGSGGS, i.e., (GGS)₄ (SEQ ID NO: 193); and GGSGGSGGSGGSGGS, i.e., (GGS)₅ (SEQ ID NO: 194), Gly-Gly (GG), GGG, GGGG (SEQ ID NO:195), GGGGG (SEQ ID NO: 196), and GGGGGG (SEQ ID NO: 197). In some embodiments, the linker is (GGGGS)n, wherein n is 1 to 5 (SEQ ID NO:123); (GGGGGS)n, wherein n is 1 to 4 (SEQ ID NO:124); GGGGS (SEQ ID NO:125); GGGGGS (SEQ ID NO:126); GGGGGSGGGGGSGGGGGS (SEQ ID NO:317); GGGGSGGGGSGGGGS (SEQ ID NO:318); GGSGGGGSGGGGSGGGGS (SEQ ID NO:319); or PGGGG (SEQ ID NO:444). In some embodiments, the linker is a GG linker. In some embodiments, the B7H3-binding polypeptide includes a combination of a GS-linker and a Glycine linker, In some embodiments, a B7H3 VHH domain may comprise the additional linker at its C-terminus, such as for linkage to another amino acid sequence, such as another polypeptide. In some of any of the provided embodiments, a B7H3 VHH domain may comprise the linker at its N-terminus, such as for linkage to another amino acid sequence, such as another polypeptide.

[0030] Provided herein is a multispecific polypeptide construct, comprising a first component comprising a heterodimeric Fc region comprising a first Fc polypeptide and a second Fc polypeptide and a second component comprising an anti-CD3 antibody or antigen-binding fragment comprising a variable heavy chain region (VH) and a variable light chain region (VL), wherein the VH and VL that comprise the anti-CD3 antibody or antigen binding fragment are linked to opposite polypeptides of the heterodimeric Fc; the first and second components are coupled by a linker, wherein the heterodimeric Fc region is positioned N-terminal to the anti-CD3 antibody; and one or both of the first and second components comprises at least one antigen binding domain comprising a single domain antibody that specifically binds B7H3 (B7H3 VHH domain). In particular embodiments, the B7H3 VHH domain can include any of the provided B7H3 VHH domain sequences, including any as described above or elsewhere herein.

[0031] In some embodiments, the multispecific polypeptide construct comprises at least (i) a first polypeptide comprising the first Fc polypeptide of the heterodimeric Fc region, the linker and the VH or VL domain of the anti-CD3 antibody or antigen binding fragment; and (ii) a second polypeptide comprising the second Fc polypeptide of the heterodimeric Fc region, the linker, optionally the same linker as present in the first polypeptide, and the other of the VH or VL domain of the anti-CD3 antibody or antigen binding fragment, wherein one or both of the first and second polypeptide comprise the at least one B7H3 VHH domain.

[0032] In some embodiments, one or both of the first and second Fc polypeptides of the heterodimeric Fc region comprises at least one modification to induce heterodimerization compared to a polypeptide of a homodimeric Fc region, optionally compared to the Fc polypeptide set forth in SEQ ID NO:198 or an immunologically active fragment thereof. In some embodiments, each of the first and second Fc polypeptides of the heterodimeric Fc region independently comprise at least one amino acid modification. In some embodiments, each of the first and second Fc polypeptides of the heterodimeric Fc region comprise a knob-into-hole modification or comprise a charge mutation to increase electrostatic complementarity of the polypeptides.

[0033] In some embodiments, the amino acid modification is a knob-into-hole modification. In one embodiment, the first Fc polypeptide of the heterodimeric Fc region comprises the modification selected from among Thr366Ser, Leu368Ala, Tyr407Val, and combinations thereof and the second Fc polypeptide of the heterodimeric Fc region comprises the modification Thr366Trp. In such an embodiment, the first and second Fc polypeptides can further comprises a modification of a non-cysteine residue to a cysteine residue, wherein the modification of the first Fc polypeptide is at one of the position Ser354 and Tyr349 and the modification of the second Fc polypeptide is at the other of the position Ser354 and Tyr349.

[0034] In some embodiments, the amino acid modification is a charge mutation to increase electrostatic complementarity of the polypeptides. In some embodiments, the first and/or second Fc polypeptides or each of the first and second Fc polypeptide comprise a modification in complementary positions, wherein the modification is replacement with an amino acid having an opposite charge to the complementary amino acid of the other polypeptide.

[0035] In some of any of the provided embodiments, one of the first or second Fc polypeptide of the heterodimeric Fc region further comprises a modification at residue Ile253. In some embodiments, the modification is Ile253Arg. In some embodiments, one of the first or second Fc polypeptide of the heterodimeric Fc region further comprises a modification at residue His435. In some embodiments, the modification is His435Arg.

[0036] In some embodiments, the Fc region of any of the provided polypeptides or constructs comprises a polypeptide that lacks Lys447.

[0037] In some embodiments, the Fc region of any of the provided polypeptides or constructs comprises at least one modification to enhance FcRn binding. In some embodiments, the modification is at a position selected from the group consisting of Met252, Ser254, Thr256, Met428, Asn434, and combinations thereof. In some embodiments, the modification is selected from the group consisting of Met252Y, Ser254T, Thr256E, Met428L, Met428V, Asn434S, and combinations thereof. In some embodiments the modification is at position Met252 and at position Met428. In some embodiments, the modification is Met252Y and Met428L. In some embodiments, the modification is Met252Y and Met428V.

[0038] In some of any of the provided embodiments, the first Fc polypeptide of the heterodimeric Fc region comprises the sequence of amino acids set forth in any of SEQ ID NOS: 293, 297, 305 or 307, and the second Fc polypeptide of the heterodimeric Fc region comprises the sequence of amino acids set forth in any of SEQ ID NOS: 294, 298, 301, 303, 309 or 311.

[0039] In some of any of the provided embodiments, the Fc region of a provided polypeptide or constrct comprises a polypeptide comprising at least one amino acid modification that reduces effector function and/or reduces binding to an effector molecule selected from an Fc gamma receptor or C1q. In some embodiments, the one or more amino acid modification is deletion of one or more of Glu233, Leu234 or Leu235.

[0040] In some of any of the provided embodiments, the first Fc polypeptide of the heterodimeric Fc region comprises the sequence of amino acids set forth in any of SEQ ID NOS: 295, 299, 306 or 308 and the second Fc polypeptide of the heterodimeric Fc region comprises the sequence of amino acids set forth in any of SEQ ID NOS: 296, 300, 302, 304, 310 or 312.

[0041] In some of any of the provided embodiments, the anti-CD3 antibody or antigen binding fragment is monovalent. In some embodimetns, the anti-CD3 antibody or antigen binding fragment is an Fv antibody fragment. In some embodiments, the Fv antibody fragment comprises a disulfide stabilized anti-CD3 binding Fv fragment (dsFv).

[0042] In some embodiments, the anti-CD3 antibody or antigen binding fragment is not a single chain antibody, for example is not a single chain variable fragment (scFv).

[0043] In some embodiments, the anti-CD3 antibody or antigen-binding fragment comprises a VH CDR1 comprising the amino acid sequence TYAMN (SEQ ID NO: 219); a VH CDR2 comprising the amino acid sequence RIRSKYNNYATYYADSVKD (SEQ ID NO: 220); a VH CDR3 comprising the amino acid sequence HGNFGNSYVSWFAY (SEQ ID NO: 221), a VL CDR1 comprising the amino acid sequence RSSTGAVTTSNYAN (SEQ ID NO: 222); a VL CDR2 comprising the amino acid sequence GTNKRAP (SEQ ID NO: 223); and a VL CDR3 comprising the amino acid sequence ALWYSNLWV (SEQ ID NO: 224). In some embodiments, the anti-CD3 antibody or antigen-binding fragment comprises: a VH having the amino acid sequence of any of SEQ ID NOS: 225-255, 480, 460, or 462 or a sequence that exhibits at least 90%, 91%, 92%, 93%, 94%, 95%, 96%, 97%, 98% or 99% sequence identity to any of SEQ ID NOS: 225-255, 480, 460, or 462; and a VL having the amino acid sequence of any of SEQ ID NOS: 256-274, 417,459, or 461 or a sequence that exhibits at least 90%, 91%, 92%, 93%, 94%, 95%, 96%, 97%, 98% or 99% sequence identity to any of SEQ ID NOS: 6256-274, 417,459, or 461. In some embodiments, the anti-CD3 antibody or antigen-binding fragment comprises the amino acid sequence of SEQ ID NO: 237 and the amino acid sequence of SEQ ID NO: 265. In some embodiments, the anti-CD3 antibody or antigen-binding fragment comprises the amino acid sequence of SEQ ID NO: 237 and the amino acid sequence of SEQ ID NO: 417. In some embodiments, the anti-CD3 antibody or antigen-binding fragment comprises the amino acid sequence of SEQ ID NO: 460 and the amino acid sequence of SEQ ID NO: 461. In some embodiments, the anti-CD3 antibody or antigen-binding fragment comprises the amino acid sequence of SEQ ID NO: 480 and the amino acid sequence of SEQ ID NO: 459.

[0044] In some embodiments, the VL of the anti-CD3 antibody or antigen binding fragment is linked to the first Fc polypeptide of the heterodimeric Fc and the VH of the anti-CD3 antibody or antigen binding fragment is linked to the second Fc polypeptide of the heterodimeric Fc.

[0045] In some embodiments, the CD3-binding region comprises a variable heavy chain region (VH) and a variable light chain region (VL), and the VL is C-terminal to the first Fc polypeptide of the heterodimeric Fc region and the VH is C-terminal to the second Fc polypeptide of the heterodimeric Fc region,wherein the first Fc polypeptide comprises a hole mutation and the second Fc polypeptide comprises a knob mutation. In some embodiments, the at least one B7H3 single domain antibody is positioned amino-terminally relative to the Fc region and/or carboxy-terminally relative to the CD3 binding region of the multispecific polypeptide construct.

[0046] In some embodiments, the multispecific polypeptide construct comprises a first B7H3 VHH domain that specifically bind B7H3 and a second B7H3 VHH domain that specifically binds B7H3. In some embodiments, the first or second B7H3 VHH domain is positioned amino-terminally relative to the Fc region of the multispecific construct and the other of the first or second B7H3 VHH domain is positioned carboxy-terminally relative to the CD3 binding region of the multispecific construct.

[0047] In some embodiments of any of the provided mutlispecific polypeptide constructs, the first component comprises in order of N-terminus to C-terminus a first B7H3 VHH domain that binds B7H3, the first Fc polypeptide of the heterodimeric Fc region, the linker, the VH or VL domain of the anti-CD3 antibody or antigen binding fragment and a second B7H3 VHH domain that binds B7H3; and the second polypeptide comprises in order of N-terminus to C-terminus the second Fc polypeptide of the heterodimeric Fc region, the linker, optionally the same linker as present in the first component, and the other of the VH or VL domain of the anti-CD3 antibody or antigen binding fragment.

[0048] In some embodiments, the multispecific polypeptide construct comprises at least a first polypeptide comprising the first Fc polypeptide of the heterodimeric Fc region, the linker and the VH or VL domain of the anti-CD3 antibody or antigen binding fragment; and a second polypeptide comprising the second Fc polypeptide of the heterodimeric Fc region, the linker, optionally the same linker as present in the first polypeptide, and the other of the VH or VL domain of the anti-CD3 antibody or antigen binding fragment, wherein one or both of the first and second polypeptide comprise the at least one B7H3 VHH domain.

[0049] In some embodiments, the polypeptide construct comprises an immunoglobulin Fc region. In some embodiments, the immunoglobulin Fc region that links the at least one B7H3 VHH domain and the one or more additional binding domain. In some embodiments, the Fc region is a homodimeric Fc region. In some embodiments, the Fc region comprises the sequence of amino acids set forth in any of SEQ ID NOS: 198, 200, 201, 202 or 203, or a sequence of amino acids that exhibits at least 85%, 86%, 87%, 88%, 89%, 90%, 91%, 92%, 93%, 94%, 95%, 96%, 97%, 98%, or 99% sequence identity to any of SEQ ID NOS: 198, 200, 201, 202 or 203. In some embodiments, the Fc region is a human IgG1. In some embodiments, the Fc region comprises the sequence of amino acids set forth in SEQ ID NO:198 or a sequence of amino acids that exhibits at least 85%, 86%, 87%, 88%, 89%, 90%, 91%, 92%, 93%, 94%, 95%, 96%, 97%, 98%, or 99% sequence identity to SEQ ID NO: 198.

[0050] In some embodiments, the Fc region is a heterodimeric Fc reigon. In some embodiments, the Fc region exhibits effector function. In some embodiments, the Fc region comprises a polypeptide comprising one or more amino acid modification that reduces effector function and/or reduces binding to an effector molecule selected from an Fc gamma receptor or C1q. In some embodiments, the one or more amino acid modification is deletion of one or more of Glu233, Leu234 or Leu235. In some embodiments, the Fc region comprises the sequence of amino acids set forth in SEQ ID NO:199 or a sequence of amino acids that exhibits at least 85%, 86%, 87%, 88%, 89%, 90%, 91%, 92%, 93%, 94%, 95%, 96%, 97%, 98%, or 99% sequence identity to SEQ ID NO: 199.

[0051] In some embodiments, one or both of the first and second Fc polypeptides of the heterodimeric Fc region comprises at least one modification to induce heterodimerization compared to a polypeptide of a homodimeric Fc region, optionally compared to the Fc polypeptide set forth in SEQ ID NO:198 or an immunologically active fragment thereof. In some embodiments, each of the first and second Fc polypeptides of the heterodimeric Fc region independently comprise at least one amino acid modification. In some embodiments, each of the first and second Fc polypeptides of the heterodimeric Fc region comprise a knob-into-hole modification or comprise a charge mutation to increase electrostatic complementarity of the polypeptides. In some embodiments, the amino acid modification is a knob-into-hole modification. In some embodiments, the amino acid modification is a charge mutation to increase electrostatic complementarity of the polypeptides. In some embodiments, the first and/or second Fc polypeptides or each of the first and second Fc polypeptide comprise a modification in complementary positions, wherein the modification is replacement with an amino acid having an opposite charge to the complementary amino acid of the other polypeptide. In some embodiments, the Fc region comprises a polypeptide comprising at least one modification to enhance FcRn binding. In some embodiments, the Fc region comprises a polypeptide comprising at least one amino acid modification that reduces effector function and/or reduces binding to an effector molecule selected from an Fc gamma receptor or C1q.

[0052] In some embodiments, one or both of the first and second components comprises at least one co-stimulatory receptor binding region (CRBR) binds to 41BB (CD137). In some embodiments, the multispecific polypeptide construct comprises only one co-stimulatory receptor binding region (CRBR). In some embodiments, the at least one co-stimulatory receptor binding region (CRBR) is positioned amino-terminally relative to the Fc region and/or carboxy-terminally relative to the CD3 binding region of the multispecific polypeptide construct.

[0053] In some embodiments of any of the provided multispecific polypeptide constructs, the first component comprises in order of N-terminus to C-terminus a first B7H3 VHH domain that binds B7H3, the first Fc polypeptide of the heterodimeric Fc region, the linker, the VH or VL domain of the anti-CD3 antibody or antigen binding fragment and a second B7H3 VHH domain that binds B7H3; and the second component comprises the CRBR and comprises in order of N-terminus to C-terminus the second Fc polypeptide of the heterodimeric Fc region, the linker, optionally the same linker as present in the first component, the other of the VH or VL domain of the anti-CD3 antibody or antigen binding fragment, wherein the CRBR is positioned amino-terminally relative to the Fc region or carboxy-terminally relative to the anti-CD3 antibody or antigen binding fragment of the second component.

[0054] In some embodiments, the at least one co-stimulatory receptor binding region (CRBR) is or comprises the extracellular domain or binding fragment thereof of the native cognate binding partner of the co-stimulatory receptor, or a variant thereof that exhibits binding activity to the co-stimulatory receptor. In some embodiments, the at least one co-stimulatory receptor binding region (CRBR) is an antibody or antigen-binding fragment thereof selected from the group consisting of a Fab fragment, a F(ab′)2 fragment, an Fv fragment, a scFv, a scAb, a dAb, a single domain heavy chain antibody, and a single domain light chain antibody. In some embodiments, the antibody or antigen-binding fragment thereof is a Fv, a scFv, a Fab, a single domain antibody (VHH domain), a VNAR, or a VHH. In some embodiments, the antibody or antigen-binding fragment is an VHH domain. In some embodiments, the VHH domain is a human or humanized VHH domain.

[0055] In some of any of the provided embodiments, the at least one co-stimulatory receptor binding region (CRBR) binds a co-stimulatory receptor selected from among 41BB (CD137), OX40 (CD134), CD27, glucocorticoid-induced TNFR-related protein (GITR), CD28, ICOS, CD40, B-cell activating factor receptor (BAFF-R), B-cell maturation antigen (BCMA), Transmembrane activator and CAML interactor (TACI), and NKG2D. In some embodiments, the at least one co-stimulatory receptor binding region (CRBR) binds a co-stimulatory receptor selected from among 41BB (CD137), OX40 (CD134), and glucocorticoid-induced TNFR-related protein (GITR).

[0056] In some embodiments, the at least one co-stimulatory receptor binding region (CRBR) binds to 41BB (CD137).

[0057] In some embodiments, the at least one co-stimulatory receptor binding region (CRBR) comprises the sequence of amino acids set forth in SEQ ID NO:400 or a sequence that has at least 85%, 86%, 87%, 88%, 89%, 90%, 91%, 92%, 93%, 94%, 95%, 96%, 97%, 98%, or 99% sequence identity to the sequence set forth in SEQ ID NO:400 and binds 4-1BB. In some embodiments, the at least one co-stimulatory receptor binding region (CRBR) comprises the sequence of amino acids set forth in SEQ ID NO:481 or a sequence that has at least 85%, 86%, 87%, 88%, 89%, 90%, 91%, 92%, 93%, 94%, 95%, 96%, 97%, 98%, or 99% sequence identity to the sequence set forth in SEQ ID NO:481 and binds 4-1BB.

[0058] In some embodiments, the at least one co-stimulatory receptor binding region (CRBR) comprises the sequence of amino acids set forth in SEQ ID NO:400. In some embodiments, the at least one co-stimulatory receptor binding region (CRBR) comprises the sequence of amino acids set forth in SEQ ID NO:481.

[0059] In some embodiments, one or both of the first and second components comprises at least one inhibitory receptor binding region (IRBR) that binds an inhibitory receptor. In some embodiments, the at least one inhibitory receptor binding region (IRBR) is positioned amino-terminally relative to the Fc region and/or carboxy-terminally relative to the CD3 binding region of the multispecific polypeptide construct. In some embodiments, the multispecific polypeptide construct comprises only one inhibitory receptor binding region (IRBR).

[0060] In some embodiments of any of the provided multispecific polypeptide constructs, the first component comprises in order of N-terminus to C-terminus a first B7H3 VHH domain that binds B7H3, the first Fc polypeptide of the heterodimeric Fc region, the linker, the VH or VL domain of the anti-CD3 antibody or antigen binding fragment and a second B7H3 VHH domain that binds B7H3; and the second component comprises the IRBR and comprises in order of N-terminus to C-terminus the second Fc polypeptide of the heterodimeric Fc region, the linker, optionally the same linker as present in the first component, the other of the VH or VL domain of the anti-CD3 antibody or antigen binding fragment, wherein the IRBR is positioned amino-terminally relative to the Fc region or carboxy-terminally relative to the anti-CD3 antibody or antigen-binding fragment of the second component.

[0061] In some embodiments, the at least one IRBR is or comprises the extracellular domain or binding fragment thereof of the native cognate binding partner of the inhibitory receptor, or a variant thereof that exhibits binding activity to the inhibitory receptor. In some embodiments, the at least one IRBR is an antibody or antigen-binding fragment thereof selected from the group consisting of a Fab fragment, a F(ab′)2 fragment, an Fv fragment, a scFv, a scAb, a dAb, a single domain heavy chain antibody, and a single domain light chain antibody. In some embodiments, the antibody or antigen-binding ″fragment thereof is a Fv, a scFv, a Fab, a single domain antibody (VHH domain), a VNAR, or a VHH. In some embodiments, the antibody or antigen-binding fragment is an VHH domain. In some embodiments, the VHH domain is a human or humanized VHH domain. In some embodiments, the at least one IRBR binds a inhibitory receptor selected from among PD-1, CTLA-4, TIGIT, VISTA and TIM3. In some embodiments, the at least one IRBR binds PD-1.

[0062] In some of any of the provided embodiments of a multispecific polypeptide construct, the first component comprises in order of N-terminus to C-terminus a first B7H3 VHH domain that binds B7H3, the first Fc polypeptide of the heterodimeric Fc region, the linker, the VH or VL domain of the anti-CD3 antibody or antigen binding fragment and a second B7H3 VHH domain that binds B7H3; and the second component comprises comprises in order of N-terminus to C-terminus one of the IRBR or the CRBR, the second Fc polypeptide of the heterodimeric Fc region, the linker, optionally the same linker as present in the first component, the other of the VH or VL domain of the anti-CD3 antibody or antigen binding fragment, and the other of the CRBR or IRBR.

[0063] In some of any of the provided embodiments, the linker is a peptide or polypeptide linker In some embodiments, the linker is 3, 4, 5, 6, 7, 8, 9, 10, 11, 12, 13, 14, 15, 16, 17, 18, 19 or 20 amino acids in length.

[0064] In some embodiments, the linker is a non-cleavable linker, such as a linker that comprises GS, GGS, GGGGS (SEQ ID NO: 315), GGGGGS (SEQ ID NO: 316) and combinations thereof. In some embodiments, the linker is or comprises the sequence GGGGGSGGGGGSGGGGGS (SEQ ID NO: 317).

[0065] In some embodiments, the linker is a cleavable linker, such as a polypeptide that functions as a substrate for a protease. In some embodiments, the protease is produced by an immune effector cell, by a tumor, or by cells present in the tumor microenvironment. In some embodiments, the protease is produced by an immune effector cell and the immune effector cell is an activated T cell, a natural killer (NK) cell, or an NK T cell. In soe embodiments, the protease is a matriptase, a matrix metalloprotease (MMP), granzyme B, orcombinations thereof. In some embodiments, the cleavable linker comprises the amino acid sequence GGSGGGG [symbol] IGGSGGS (SEQ ID NO: 361).

[0066] Provided herein is an isolated single domain antibody that binds B7H3 and that contains any of the B7H3 VHH domain squences provided herein, including any as described above or elsewhere herein.

[0067] Provided herein is an isolated single domain antibody that binds B7H3, comprising a complementarity determining region 1 (CDR1) comprising an amino acid sequence selected from the group consisting of SEQ ID NO: 115, 116, 117, 118, 119, 120, 121, 122, 123, 124, 125, 126, 127, 128, 129, 130, 131, 132, 133, 134, 135, 136, 137, 138, 139, 140, 141, 142, 143, 144 and 145; a complementarity determining region 2 (CDR2) comprising an amino acid sequence selected from the group consisting of SEQ ID NO: 146, 147, 148, 149, 150, 151, 152, 153, 154, 155, 156, 157, 158, 159, 160, 161, 162, 163, 164, 165, 166 and 167; and a complementarity determining region 3 (CDR3) comprising an amino acid sequence selected from the group consisting of SEQ ID NO: 168, 169, 170, 171, 172, 173, 174, 175, 176, 177, 178, 179, 180, 181, 182, 183, 184, 185, 186, 187, 188, 189, and 483-488.

[0068] In some embodiments, the heterodimeric Fc region comprises an Fc hole polypeptide and an Fc knob polypeptide, wherein the VL of the anti-CD3 antibody or antigen binding fragment is positioned C-terminal to the Fc hole and the VH of the anti-CD3 antibody or antigen binding fragment is positioned C-terminal to the Fc knob.

[0069] In some embodiments, the anti-CD3 antibody or antigen binding fragment is monovalent. In some embodiments, the anti-CD3 antibody or antigen binding fragment is not a single chain antibody, optionally is not a single chain variable fragment (scFv). In some embodiments, the anti-CD3 antibody or antigen binding fragment is an Fv antibody fragment. In some embodiments, the Fv antibody fragment comprises a disulfide stabilized anti-CD3 binding Fv fragment (dsFv). In some embodiments, the anti-CD3 antibody or antigen-binding fragment comprises the amino acid sequence of SEQ ID NO: 237 and the amino acid sequence of SEQ ID NO: 265. In some embodiments, the anti-CD3 antibody or antigen-binding fragment comprises the amino acid sequence of SEQ ID NO: 237 and the amino acid sequence of SEQ ID NO: 417. In some embodiments, the anti-CD3 antibody or antigen-binding fragment comprises the amino acid sequence of SEQ ID NO: 460 and the amino acid sequence of SEQ ID NO: 461. In some embodiments, the anti-CD3 antibody or antigen-binding fragment comprises the amino acid sequence of SEQ ID NO: 480 and the amino acid sequence of SEQ ID NO: 459.

[0070] Provided herein is a polynucleotide(s) encoding any of the provided B7H3-binding polypeptides. Provided herein is a polynucleotide(s) encoding any of the provided multispecific polypeptide constructs. Provided herein is a polynucleotide, comprising a first nucleic acid sequence encoding a first polypeptide of any of the provided multispecific constructs and a second nucleic acid sequence encoding a second polypeptide of any of the provided multispecific constructs, wherein the first and second nucleic acid sequence are separated by an internal ribosome entry site (IRES), or a nucleic acid encoding a self-cleaving peptide or a peptide that causes ribosome skipping.

[0071] Provided herein is a polynucleotide encoding any of the provided single domain antibodies. Provided herein is a vector comprising any of provided polynucleotides.

[0072] Provided herein is a cell comprising any of the provided polynucleotide or polynucleotides or any of the provided vector or vectors.

[0073] Provided herein is a method of producing a polypeptide including introducing into a cell any of the provided polynucleotide or polynucleotides or a vector or vectors and culturing the cell under conditions to produce the multispecific polypeptide construct. Provided herein is a polypeptide produced by any of the methods provided herein.

[0074] Provided herein is an engineered immune cell, comprising a chimeric antigen receptor comprising an extracellular domain comprising any of the provided single domain antibodies; a transmembrane domain; and an intracellular signaling domain.

[0075] Provided herein is a pharmaceutical composition comprising any of the provided B7H3-binding polypeptides, multispecific polypeptide constructs, single domain antibodies or engineered immune cells.

[0076] Provided herein is a method of stimulating or inducing an immune response in a subject, the method comprising administering, to a subject in need thereof, any of the provided B7H3-binding polypeptides, multispecific polypeptide constructs, single domain antibodies or engineered immune cells, or pharmaceutical compositions. Provided herein is a method of treating a disease or condition in a subject, the method comprising administering, to a subject in need thereof, a therapeutically effective amount of any of the provided B7H3-binding polypeptides, multispecific polypeptide constructs, single domain antibodies or engineered immune cells, or pharmaceutical compositions.

### BRIEF DESCRIPTION OF THE DRAWINGS

[0077] FIGS. 1A-1F set forth a series of graphs depicting the ability of various anti-B7H3 single domain antibodies (sdAb) to bind cell-surface B7H3. Binding was assessed by flow cytometry to B7H3-positive cell lines NCI-H460 (FIGS. 1A-1B) or A375 (FIG. 1C), or 293 cells transfected with B7H3 (FIGS. 1D, 1E, 1F).

[0078] FIGS. 2A-2V set forth a series of graphs depicting the ability of humanized sdAbs to bind cell surface B7H3. FIGS. 2A-2C show the binding of 57B04 and humanized variants thereof on NCI-H460. FIG. 2D shows the binding of 57B06 and humanized (hz) variants thereof to NCI-H460. FIG. 2E shows the binding of 1H5 and humanized (hz) variants thereof to 293FS cells expressing B7H3. FIGS. 2F-2I and 2X-Y show the binding of humanized (hz) 1A5 variants to NCI-H460 (FIG. 2F) or 293FS cells expressing B7H3 (FIGS. 2G, 2H, 2I, 2X, 2Y). FIGS. 2J-2W show the binding of 58E05 and humanized (hz) variants thereof to HCT-116 (FIGS. 2J, 2K, 2L), NCI-H460 (FIGS. 2M, 2N, 2O, 2P, 2R, 2S, 2T, 2U), A549 (FIG. 2Q) or 293FS cells expressing B7H3 (FIGS. 2V and 2W).

[0079] FIGS. 3A-3E depict a series of schematics representing various B7H3-targeted constrained CD3 engaging constructs. The basic components of the B7H3-targeted constrained CD3 engaging constructs of the present disclosure have constrained CD3 binding. The antigen binding domain(s) are positioned at the amino and/or carboxy termini. The Fc region, such as a heterodimeric Fc region, is positioned N-terminal to the CD3 binding region. This positioning of the Fc in close proximity to the CD3 binding region obstructs CD3 binding.

[0080] FIGS. 4A-4C depict the presence or absence of binding of cx3855 or B7H3xCD3 DART-Fc to B7H3 target cells or T cells. FIG. 4A depicts the presence or absence of binding to B7H3 positive cells, A375 cell line. FIG. 4B depicts the presence or absence of binding to primary human T-cells. FIG. 4C depicts a titration comparing binding to A375 and primary human T-cells.

[0081] FIGS. 5A-5C depict the presence or absence of binding of cx4137 to B7H3 target cells or T cells. FIG. 5A depicts the presence or absence of binding to B7H3 positive A375 cells. FIG. 5B depicts the presence or absence of binding to primary human T-cells. FIG. 5C depicts a titration comparing binding to A375 and primary human T-cells.

[0082] FIGS. 6A-6C depict the presence or absence of binding of cx3090 to B7H3 target cells or T cells. FIG. 6A depicts the presence or absence of binding to B7H3 positive cells, A375 cell line. FIG. 6B depicts the presence or absence of binding to primary human T-cells. FIG. 6C depicts a titration comparing binding to A375 and primary human T-cells.

[0083] FIGS. 7A-7C depict the presence or absence of binding of cx3243 to B7H3 target cells or T cells. FIG. 7A depicts the presence or absence of binding to B7H3 positive cells, A375 cell line. FIG. 7B depicts the presence or absence of binding to primary human T-cells. FIG. 7C depicts a titration comparing binding to A375 and primary human T-cells.

[0084] FIGS. 8A-8C depict the presence or absence of binding of cx4736 to B7H3 target cells or T cells. FIG. 8A depicts the presence or absence of binding to B7H3 positive cells, A375 cell line. FIG. 8B depicts the presence or absence of binding to primary human T-cells. FIG. 8C depicts a titration comparing binding to A375 and primary human T-cells.

[0085] FIGS. 9A-9C depicts the presence or absence of binding of cx4136 to B7H3 target cells or T cells. FIG. 9A depicts the presence or absence of binding to B7H3 positive cells, A375 cell line. FIG. 9B depicts the presence or absence of binding to primary human T-cells. FIG. 9C depicts a titration comparing binding to A375 and primary human T-cells.

[0086] FIGS. 10A-10C depict the presence or absence of binding of cx3072 to B7H3 target cells or T cells. FIG. 10A depicts the presence or absence of binding to B7H3 positive cells, A375 cell line.

[0087] FIG. 10B depicts the presence or absence of binding to primary human T-cells. FIG. 10C depicts a titration comparing binding to A375 and primary human T-cells.

[0088] FIGS. 11A-11C depict the presence or absence of binding of cx4641 to B7H3 target cells or T cells. FIG. 11A depicts the presence or absence of binding to B7H3 positive cells, A375 cell line. FIG. 11B depicts the presence or absence of binding to primary human T-cells. FIG. 11C depicts a titration comparing binding to A375 and primary human T-cells.

[0089] FIGS. 12A-12C depict the presence or absence of binding of cx4645 to B7H3 target cells or T cells. FIG. 12A depicts the presence or absence of binding to B7H3 positive cells, A375 cell line. FIG. 12B depicts the presence or absence of binding to primary human T-cells. FIG. 12C depicts a titration comparing binding to A375 and primary human T-cells.

[0090] FIGS. 13A-13C depict the presence or absence of binding of cx4736 (50 nM) to B7H3 target cells or T cells. FIG. 13A depicts the presence or absence of binding to B7H3 positive cells, A375 cell line. FIG. 13B depicts the presence or absence of binding to primary human T-cells. FIG. 13C depicts a titration comparing binding to A375 and primary human T-cells.

[0091] FIGS. 14A-14C depict the presence or absence of binding of cx4736 (12.5 nM) to B7H3 target cells or T cells. FIG. 14A depicts the presence or absence of binding to B7H3 positive cells, A375 cell line. FIG. 14B depicts the presence or absence of binding to primary human T-cells. FIG. 14C depicts a titration comparing binding to A375 and primary human T-cells.

[0092] FIGS. 15A-15C depict the presence or absence of binding of cx2846 to B7H3 target cells or T cells. FIG. 15A depicts the presence or absence of binding to B7H3 positive cells, A375 cell line. FIG. 15B depicts the presence or absence of binding to primary human T-cells. FIG. 15C depicts a titration comparing binding to A375 and primary human T-cells.

[0093] FIGS. 16A-16C depict the presence or absence of binding of cx3834 to B7H3 target cells or T cells. FIG. 16A depicts the presence or absence of binding to B7H3 positive cells, A375 cell line. FIG. 16B depicts the presence or absence of binding to primary human T-cells. FIG. 16C depicts a titration comparing binding to A375 and primary human T-cells.

[0094] FIGS. 17A-17C depict the presence or absence of binding of cx3960 to B7H3 target cells or T cells. FIG. 17A depicts the presence or absence of binding to B7H3 positive cells, A375 cell line. FIG. 17B depicts the presence or absence of binding to primary human T-cells. FIG. 17C depicts a titration comparing binding to A375 and primary human T-cells.

[0095] FIGS. 18A-18C depict the presence or absence of binding of cx4904 to B7H3 target cells or T cells. FIG. 18A depicts the presence or absence of binding to B7H3 positive cells, A375 cell line. FIG. 18B depicts the presence or absence of binding to primary human T-cells. FIG. 18C depicts a titration comparing binding to A375 and primary human T-cells.

[0096] FIGS. 19A-19C depict the presence or absence of binding of cx4908 to B7H3 target cells or T cells. FIG. 19A depicts the presence or absence of binding to B7H3 positive cells, A375 cell line.

[0097] FIG. 19B depicts the presence or absence of binding to primary human T-cells. FIG. 19C depicts a titration comparing binding to A375 and primary human T-cells.

[0098] FIGS. 20A-20B depict graphs demonstrating the ability of B7H3-targeted constrained CD3 engaging constructs to elicit B7H3-dependent T-cell activation. A Jurkat CD3 NFAT-GFP reporter cell line was used to monitor T-cell activation. A375 cells (FIG. 20A) and A375 cells wherein the B7H3 gene was disrupted by CRISPR (A375 B7H3−/−, FIG. 20B) were used as antigen positive and negative cell lines, respectively. A B7H3xCD3 bispecific in the DART-Fc format was used as a comparison.

[0099] FIGS. 21A-21B depict graphs demonstrating the ability of B7H3-targeted constrained CD3 engaging constructs to mediate antigen specific T-cell cytotoxicity toward the B7H3 positive cell line A375 (FIG. 21A) or an A375 cell line wherein the B7H3 gene was disrupted by CRISPR (A375 B7H3−/−, FIG. 21B), which were used as antigen positive and negative cell lines, respectively. A B7H3xCD3 bispecific in the DART-Fc format was used as a comparison.

[0100] FIGS. 22A-22B depict CD25 expression in CD4+ T cells in the presence of B7H3-targeted constrained CD3 engaging constructs in cocultures of T cells and either B7H3 positive cells (A375; FIG. 22A) or B7H3 negative cells (A375 B7H3−/−; FIG. 22B).

[0101] FIGS. 23A-23B depict CD69 expression in CD4+ T cells in the presence of B7H3-targeted constrained CD3 engaging constructs in cocultures of T cells and either B7H3 positive cells (A375; FIG. 23A) or B7H3 negative cells (A375 B7H3−/−; FIG. 23B).

[0102] FIGS. 24A-24B depict CD71 expression in CD4+ T cells in the presence of B7H3-targeted constrained CD3 engaging constructs in cocultures of T cells and either B7H3 positive cells (A375; FIG. 24A) or B7H3 negative cells (A375 B7H3−/−; FIG. 24B).

[0103] FIGS. 25A-25B depict CD25 expression in CD8+ T cells in the presence of B7H3-targeted constrained CD3 engaging constructs in cocultures of T cells and either B7H3 positive cells (A375; FIG. 25A) or B7H3 negative cells (A375 B7H3−/−; FIG. 25B).

[0104] FIGS. 26A-26B depict CD69 expression in CD8+ T cells in the presence of B7H3-targeted constrained CD3 engaging constructs in cocultures of T cells and either B7H3 positive cells (A375; FIG. 26A) or B7H3 negative cells (A375 B7H3−/−; FIG. 26B).

[0105] FIGS. 27A-27B depict CD71 expression in CD8+ T cells in the presence of B7H3-targeted constrained CD3 engaging constructs in cocultures of T cells and either B7H3 positive cells (A375; FIG. 27A) or B7H3 negative cells (A375 B7H3−/−; FIG. 27B).

[0106] FIGS. 28A-28D depict a series of graphs demonstrating the ability of B7H3-targeted constrained CD3 engaging constructs to elicit IFNγ (FIGS. 28A-28C) or TNFα (FIG. 28D) production from T cells or PBMCs in an antigen-dependent manner. Cytokine production was monitored using FluoroSpot assay in the presences or absence of a B7H3 positive cells line A375.

[0107] FIG. 29A depicts the ability of 58E05-Fc to induce ADCC of A375 target cells as assessed using a Jurkat reporter engineered to stably express CD16a with an NFAT-driven luciferase reporter gene. FIG. 29B depicts the ability of humanized variants of 58E05-Fc and 1A5-Fc to induce ADCC of SHP-77 target cells as assessed using a Jurkat reporter engineered to stably express CD16a with an NFAT-driven luciferase reporter gene. A conventional anti-B7H3 IgG1 antibody was used as a comparision and displayed no ability to mediate CD16a expression in the presence of SHP-77 a cell line that expresses low to intermediate levels of B7H3.

[0108] FIG. 30A is a schematic of various B7H3-targeting constrained CD3 constructs composed of two polypeptides, Chain 1 and Chain 2. Chain 1 contains either a heterodimeric Fc “hole,” linked via a non-cleavable linker to an anti-CD3 VL domain modified at G100C (top); a B7H3-targeting sdAb linked to a heterodimeric Fc “hole,” linked via a non-cleavable linker to an anti-CD3 VL domain (middle); or an B7H3-targeting sdAb linked to a heterodimeric Fc “hole,” linked via a non-cleavable linker to an anti-CD3 VL domain modified at G100C (bottom). Chain 2 contains either a B7H3-targeted sdAb, linked to a complementary heterodimeric Fc “knob,” linked via the linker as above to an anti-CD3 VH domain modified at G44C linked to second B7H3 sdAb (top); a B7H3-targeted sdAb, linked to a complementary heterodimeric Fc “knob,” linked via the linker as above to an anti-CD3 VH domain (middle); or a B7H3-targeted sdAb, linked to a complementary heterodimeric Fc “knob,” linked via the linker as above to an anti-CD3 VH domain modified by G44C (bottom). When co-expressed the CD3 binding domain is properly assembled via the association of the VL:VH on the hole and knob, respectively. Where denoted the VH:VL interaction is stabilized by an engineered disulfide bond between the modified residues G44C in the VH domain and G100C in the VL domain.

[0109] FIG. 30B is a schematic of various B7H3-targeting constrained CD3 constructs composed of two polypeptides, Chain 1 and Chain 2. Chain 1 contains a heterodimeric Fc “hole,” linked via a non-cleavable linker to an anti-CD3 VL domain modified at G100C linked to a co-stimulatory receptor targeting sdAb. Chain 2 contains either a B7H3-targeted sdAb, linked to a complementary heterodimeric Fc “knob,” linked via the linker as above to an anti-CD3 VH domain modified at G44C linked to second B7H3-targeted sdAb (top); a heterodimeric Fc “knob,” linked via the linker as above to an anti-CD3 VH domain modified at G44C linked to a B7H3-targeted sdAb (middle); or a B7H3-targeted sdAb, linked to a complementary heterodimeric Fc “knob,” linked via the linker as above to an anti-CD3 VH domain modified by G44C (bottom). When co-expressed the CD3 binding domain is properly assembled via the association of the VL:VH on the hole and knob, respectively. VH:VL interaction is stabilized by an engineered disulfide bond between the modified residues G44C in the VH domain and G100C in the VL domain. The resulting constructs engage B7H3 either in a bivalent (top) or a monovalent (middle and bottom) manner. All the constructs herein contain a co-stimulatory receptor targeting sdAb.

[0110] FIG. 30C is a schematic of various B7H3-targeting constrained CD3 constructs composed of three polypeptides, Chain 1, Chain 2 and Chain 3, wherein the B7H3 targeting domain is a FAB. Chain 1 contains a BH73-targeting VH, an IgG Constant Heavy 1 (CH1) linked via a hinge to a first member of a heterodimeric Fc (Fc-Het-1), linked via the linker as above to an anti-CD3 VL domain that either lacks (top) or contains the modification of G100C (middle). Chain 2 contains a BH73-targeting VH, an IgG Constant Heavy 1 (CH1) linked via a hinge to a second member of a heterodimeric Fc (Fc-Het-2), linked via the linker as above to an anti-CD3 VH domain that either lacks (top) or contains the modification of G44C (middle). Chain 3 contains a complementary B7H3-targeting VL domain linked to human Ig Constant Light (CL) region. When co-expressed the CD3 binding domain is properly assembled via the association of the VL: VH on the complimentary heterodimeric Fc regions. Where denoted the VH: VL interaction is stabilized by an engineered disulfide bond between the modified residues G44C in the VH domain and G100C in the VL domain.

[0111] FIGS. 31A-F depict cellular binding by representative B7H3-targeting constrained CD3 engaging constructs. FIGS. 31A, C, and E show binding to A375 cells (a B7H3 positive human melanoma cell line). FIGS. 31B, D, and F show the lack of binding to isolated T cells.

[0112] FIGS. 32A-D depict the ability of representative B7H3-targeting constrained CD3 engaging constructs to agonize CD3 in a target dependent manner. FIG. 32A and FIG. 32C depict the capacity to mediate CD3 signaling in the presence of B7H3 positive A375 cells, while FIG. 32B and FIG. 32D show the inability to mediate CD3 signaling in the presence of B7H3 negative CCRF-CEM cells. A Jurkat CD3 NFAT-GFP reporter cell line was used to assess CD3 agonism.

[0113] FIG. 33A depicts the ability of a representative B7H3-targeting constrained CD3 engaging construct (cx3072) to induce T-cell mediated cytotoxicity in a target dependent manner. Target cells were labeled with cytolD red label and dying cells were visualized by addition of Caspase 3/7 green reagent. Cytotoxicity was assessed by determining the overlap area of red target cells and green dying cells. A B7H3 negative A375 cell line, generated by CRISPR technology was used to test antigen specific T-cell mediated cytotoxicity. cx3072 was unable to elicit T-cell mediated cytotoxicity of these B7H3 deficient A375 cells. FIG. 33B shows the ability of cx5952 to induce T-cell mediated cytotoxicity in the presence of B7H3 positive A375 cells, but not in the presence of B7H3 negative CCRF-CEM cells.

[0114] FIGS. 34A and 34B depict the ability of representative B7H3-targeting constrained CD3 engaging constructs to induce T-cell mediated cytotoxicity in a target dependent manner. FIG. 34A depicts the capacity of these constructs to induce T-cell mediated cytotoxicity in the presence of B7H3 positive A375 cells, while FIG. 34B depicts the capacity of these constructs to induce T-cell mediated cytotoxicity in the presence of B7H3 negative CCRF-CEM cells. Cytotoxicity was assessed by determining the overlap area of red target cells and green dying cells.

[0115] FIGS. 34C and 34D depict the ability of representative B7H3-targeting constrained CD3 engaging constructs to induce T-cell mediated cytotoxicity in a target dependent manner. FIG. 34C depicts the capacity of these constructs to induce T-cell mediated cytotoxicity in the presence of B7H3 positive A375 cells, while FIG. 34C depicts the capacity of these constructs to induce T-cell mediated cytotoxicity in the presence of B7H3 negative CCRF-CEM cells. Cytotoxicity was assessed by determining the overlap area of red target cells and green dying cells.

[0116] FIGS. 35A-C depict the ability of a representative B7H3-targeting constrained CD3 engaging construct (cx5952) to induce T-cell mediated cytotoxicity and T-cell activation in a target dependent manner. Cytotoxicity was assessed by determining the overlap area of red target cells and green dying cells. FIG. 35A-C show the ability of cx5952 to activate CD4+ and CD8+ T-cells in a target dependent manner. T-cell activation was assessed by expression of the T cell activation markers CD25 (FIG. 35A), CD69 (FIG. 35B), and CD71 (FIG. 35C).

[0117] FIGS. 35D-35K depict the ability of representative B7H3-targeting constrained CD3 engaging constructs to induce T-cell activation in a target dependent manner. B7H3-target-dependent CD4+ T-cell activation is shown by expression of the T cell activation markers CD25 (FIG. 35D) and CD71 (FIG. 35F). B7H3-target-dependent CD8+ T-cell activation is shown by expression of the T cell activation markers CD25 (FIG. 35H) and CD71 (FIG. 35J). Non-target CD8+ T-cell activation was not observed based on T cell activation marker CD25 as shown in CD4+ T cells (FIG. 35E) or CD8+ T cells (FIG. 31) or based on T cell activation marker CD71 as shown in CD4+ T cells (FIG. 35G) or CD8+ T cells (FIG. 35K).

[0118] FIG. 36A depicts the ability of representative B7H3-targeting constrained CD3 engaging constructs to induce IFNγ production in a target dependent manner. FIG. 36A shows the production of IFNγ from T-cells cultured with B7H3 positive A375 cells or B7H3 negative CCRF-CEM cells in the presence of the B7H3-targeting CD3 engaging constructs.

[0119] FIG. 36B depicts the ability of representative B7H3-targeting constrained CD3 engaging constructs to induce IFNγ production in a target dependent manner. FIG. 36B shows the production of IFNγ from T-cells cultured with B7H3 positive A375 cells or B7H3 negative CCRF-CEM cells in the presence of the B7H3-targeting CD3 engaging constructs.

[0120] FIGS. 37A and 37B depict cellular binding of representative B7H3-targeting constrained CD3 engaging constructs. cx5187 and cx5823 each contain two B7H3 binding domains while constructs cx5873 and cx5965 each contain one B7H3 binding domain. FIG. 37A shows binding to B7H3 positive A375 cells. FIG. 37B shows the lack of binding to B7H3 negative CCRF-CEM cells and isolated T-cells.

[0121] FIGS. 37C and FIG. 37D depict the ability of representative B7H3-targeting constrained CD3 engaging constructs to agonize CD3 in a target dependent manner. FIG. 37C shows that engaging B7H3 positive A375 cells with a molecule that is bivalent and bi-epitopic to B7H3 (cx5187) induced more potent CD3 signaling than constructs that are monovalent to B7H3 (cx5873 and cx5965). FIG. 37D shows the lack of activation of T-cells in the presence of B7H3 negative CCRF-CEM cells. A Jurkat CD3 NFAT-GFP reporter cell line was used to assess CD3 agonism.

[0122] FIGS. 38A and FIG. 38B depict the ability of representative B7H3-targeting constrained CD3 engaging constructs to induce T-cell mediated cytotoxicity in a target dependent manner. FIG. 38A shows that targeting B7H3 positive A375 cells with a construct that is bivalent and bi-epitopic to B7H3 (cx5187) induced more potent T-cell mediated cytotoxicity than constructs that are monovalent to B7H3 (cx5873 and cx5965). FIG. 38B depicts the lack of T-cell mediated cytotoxicity against B7H3 negative CCRF-CEM cells.

[0123] FIGS. 39A-D depict the ability of representative B7H3-targeting constrained CD3 engaging constructs to activate T-cells in the presence of B7H3 positive A375 cells, but not in the presence of B7H3 negative CCRF-CEM cells. FIGS. 39A and 39B show that targeting B7H3 positive A375 cells with a construct that is bivalent and bi-epitopic to B7H3 (cx5187), induced more potent CD25 expression on CD4+ and CD8+ T-cells, respectively, than constructs that are monovalent to B7H3 (cx5873 and cx5965). FIGS. 39C and 39D show the lack of CD25 expression on CD4+ and CD8+ T-cells, respectively, in the presence of B7H3 negative CCRF-CEM cells.

[0124] FIGS. 40A and 40B demonstrate the ability of representative B7H3-targeting constrained CD3 engaging constructs to elicit T-cell mediated cytotoxicity in the presence of B7H3-positive A375 cells (FIG. 40A) but not in the presence of CCRF-CEM B7H3-negative cells (FIG. 40B).

[0125] FIGS. 40C-40J demonstrate the ability of representative B7H3-targeting constrained CD3 engaging constructs to elicit T cell activation in the presence of B7H3-positive A375 cells but not in the presence of CCRF-CEM B7H3-negative cells, as assessed by: expression of CD25 on CD4+ T cells (FIGS. 40C and 40D, respectively), CD25 expression on CD8+ T cells (FIGS. 40E and 40F, respectively), CD71 expression on CD4+ T cells (FIGS. 40G and 40H, respectively), CD71 expression on CD8+ T cells (FIGS. 40I and 40J, respectively).

[0126] FIGS. 40K and 40L demonstrate the ability of representative B7H3-targeting constrained CD3 engaging constructs to elicit T cell cytokine production in the presence of B7H3-positive A375 cells (FIG. 40K) but not in the presence of CCRF-CEM B7H3-negative cells (FIG. 40L).

[0127] FIGS. 41A-41B depict various representative B7H3-targeted constrained CD3 engagers with a 4-1BB binding domain as a CRBR. cx5841 and cx5187 have a B7H3-targeting sdAb positioned at the N and C-termini of one chain of the heterodimer, the Fc knob, and have 41BB-targeting sdAb positioned at the C-termini of the opposite chain of the heterodimer, the Fc hole, but have the VH and VL of the CD3 binding Fv positioned on opposite sides with respect to each other.

[0128] FIGS. 42A-D depict results of T cell reporter assays for exemplary constructs described in FIGS. 41A-B. FIGS. 42A and 42B depict mean fluorescence intensity (MFI) of the GFP reporter when the B7H3 positive cell line A375 or the B7H3 negative cell line CCRF-CEM, respectively, were co-cultured with Jurkat CD3 NFAT-GFP reporter cells. FIGS. 42C and 42D depict relative luminescent units (RLU) of a luciferase reporter when the B7H3 positive cell line A375 or the B7H3 negative cell line CCRF-CEM, respectively, were co-cultured with Jurkat CD3 NFAT-Luciferase reporter cells.

### DETAILED DESCRIPTION

[0129] Provided herein are polypeptides that specifically bind to B7H3, hereinafter also called B7H3-binding polypeptides. In some embodiments, the provided binding polypeptides comprise at least one VHH domain that binds B7H3. In some embodiments, a B7H3-binding polypeptide provided herein comprises one, two, three, four, five, six, seven, or eight VHH domains that each individually binds B7H3. In some embodiments, a B7H3-binding polypeptide provided herein comprises one, two, three, or four VHH domains that bind B7H3. In some embodiments, the B7H3-binding polypeptides are monospecific. In some embodiments, the B7H3-binding polypeptides are multispecific. For example, provided B7H3-binding polypeptides include polypeptides that may comprise at least one VHH domain that binds B7H3 and one or more additional binding domains, such as one or more additional VHH domains, that bind one or more target proteins other than B7H3.

[0130] In some embodiments, a B7H3-binding polypeptide comprises at least one VHH domain that binds B7H3 and an Fc domain. In some embodiments, a B7H3-binding polypeptide provided herein comprises one, two, three, or four VHH domains that bind B7H3 and an Fc domain. In some embodiments, an Fc domain mediates dimerization of the B7H3-binding polypeptide at physiological conditions such that a dimer is formed that doubles the number of B7H3 binding sites. For example, a B7H3-binding polypeptide comprising three VHH domains that bind B7H3 and an Fc region is trivalent as a monomer, but at physiological conditions, the Fc region may mediate dimerization, such that the B7H3-binding polypeptide exists as a hexavalent dimer under such conditions.

[0131] B7H3 (also called CD276) is a member of the B7 family of immune cell modulating molecules. It is expressed on the surface of a wide variety of tumor cells and tumor vasculature including, but not limited to, neuroblastoma, melanoma, renal cell cancer, prostate cancer, colorectal cancer, pancreatic cancer, gastric cancer, breast cancer, ovarian cancer and small cell lung cancer. In humans the B7H3 protein is expressed in two forms, 2Ig and 4Ig. The 2Ig form has an extracellular region containing only one V-like and one C-like Ig domain, similar to other B7 family members (Chapoval et al, 2001, Nat. Immunol. 2:269-274). The 4Ig form contains a duplication of the V-like and the C-like Ig domain in tandem (Steinberger et al, 2004, J. Immunol. 172:2352-2359; Sun et al, 2002, J. Immunol. 168:6294-6297), and, has been shown to be the dominant isoform induced on immune cells and tumor cells in humans (Zhou et al. (2007) Tissue Antigens, 70:96-104). It has been shown that, in some cases, the level of B7H3 expression on tumor tissue is strongly correlated with the extent as to which the tumor has metastasized, with an increased risk of clinical cancer recurrence and with cancer-specific death (Roth et al, 2007, Cancer Res. 67:7893-7900; Zang et al, 2007, Proc. Natl. Acad. Sci. U.S.A. 104: 19458-19463). Similarly, a high level of B7H3 expression on tumor tissue correlated with poor patient survival in clear cell renal cell carcinoma, urothelial cell carcinoma (Crispen et al, 2008, Clin. Cancer Res. 14:5150-5157; Boorjian et al., 2008, Clin. Cancer Res. 14:4800-4808), ovarian cancer (Zang et al, 2010, Mod. Pathol. 23: 1 104-1 112), glioblastoma (Lemke et al, 2012, Clin. Cancer Res. 18: 105-117) osteosarcoma (Wang et al, 2013, PLoS One 8:e70689), pancreatic cancer (Yamato et al, 2009, Br. J. Cancer 101 : 1709-1716) and neuroblastoma (Gregorio et al, 2008, Histopathology 53:73-80).

[0132] An exemplary sequence of human B7H3 (4ig) is set forth as follows:

MLRRRGSPGMGVHVGAALGALWFCLTGALE
VQVPEDPVVALVGTDATLCCSFSPEPGFSL
AQLNLIWQLTDTKQLVHSFAEGQDQGSAYA
NRTALFPDLLAQGNASLRLQRVRVADEGSF
TCFVSIRDFGSAAVSLQVAAPYSKPSMTLE
PNKDLRPGDTVTITCSSYQGYPEAEVFWQD
GQGVPLTGNVTTSQMANEQGLFDVHSILRV
VLGANGTYSCLVRNPVLQQDAHSSVTITPQ
RSPTGAVEVQVPEDPVVALVGTDATLRCSF
SPEPGFSLAQLNLIWQLTDTKQLVHSFTEG
RDQGSAYANRTALFPDLLAQGNASLRLQRV
RVADEGSFTCFVSIRDFGSAAVSLQVAAPY
SKPSMTLEPNKDLRPGDTVTITCSSYRGYP
EAEVFWQDGQGVPLTGNVTTSQMANEQGLF
DVHSVLRVVLGANGTYSCLVRNPVLQQDAH
GSVTITGQPMTFPPEALWVTVGLSVCLIAL
LVALAFVCWRKIKQSCEEENAGAEDQDGEG
EGSKTALQPLKHSDSKEDDGQEIA
(SEQ ID NO: 190, signal sequence underlined)

[0133] In some cases, the provided B7H3 binding polypeptides directly block or inhibit activity of B7H3, which, in some aspects, can be used as a therapeutic to inhibit or reduce tumor cell growth or survival.

[0134] A variety of B7H3 polypeptide binding formats are provided. In some examples, B7H3 binding polypeptides include B7H3 VHH-Fc polypeptides. In some embodiments, the Fc is an Fc that exhibits immune effector activity, such as one or more effector functions such as antibody-dependent cellular cytotoxicity (ADCC), antibody-dependent cellular phagocytosis (ADCP) and/or complement-dependent cytotoxicity (CDC).

[0135] In some embodiments, the provided B7H3-binding polypeptides can be used to stimulate an immune response in a subject, which, in some aspects, treats a disease or disorder, such as a cancer, in the subject. In some aspects, a B7H3-binding polypeptide provided herein, such as a B7H3-Fc, can bind to B7H3-expressing tumor cells and induce an active immune response against the tumor cells expressing B7H3. In some cases, the active immune response can cause the death of the cancerous cells (e.g., antibody binding to cancer cells inducing apoptotic cell death), or inhibit the growth (e.g., block cells cycle progression) of the cancerous cells. In other cases, a B7H3-binding polypeptide provided herein, such as a B7H3 VHH-Fc, can bind to cancerous cells and antibody dependent cellular cytotoxicity (ADCC) can eliminate cancerous cells to which the B7H3-binding polypeptide binds. In some cases, provided B7H3 VHH-binding polypeptides can also activate both cellular and humoral immune responses and recruit more natural killer cells or increased production of cytokines (e.g., IL-2, IFN-gamma, IL-12, TNF-alpha, TNF-beta, etc.) that further activate an individual's immune system to destroy cancerous cells. In yet another embodiment, B7H3 binding polypeptides, such as B7H3 VHH-Fc, can bind to cancerous cells, and macrophages or other phagocytic cell can opsonize the cancerous cells, such as via CDC or ADCP processes.

[0136] In other aspects, also provided herein are VHH-binding polypeptides that exhibit multispecific binding. In some cases, the binding polypeptides include polypeptides that exhibit dual affinity for B7H3 and a T cell antigen, such as CD3. In some aspects, such dual affinity molecules are capable of engaging or activating T cells at the site of a tumor upon binding of tumor-expressed B7H3. In particular, among such molecules provided herein are molecules that exhibit constrained CD3 binding. Also provided herein are engineered cells, such as engineered T cells, that express a chimeric antigen receptor containing a B7H3 binding polypeptide.

[0137] All publications, including patent documents, scientific articles and databases, referred to in this application are incorporated by reference in their entirety for all purposes to the same extent as if each individual publication were individually incorporated by reference. If a definition set forth herein is contrary to or otherwise inconsistent with a definition set forth in the patents, applications, published applications and other publications that are herein incorporated by reference, the definition set forth herein prevails over the definition that is incorporated herein by reference.

[0138] The techniques and procedures described or referenced herein are generally well understood and commonly employed using conventional methodology by those skilled in the art, such as, for example, the widely utilized methodologies described in Sambrook et al., Molecular Cloning: A Laboratory Manual 3rd. edition (2001) Cold Spring Harbor Laboratory Press, Cold Spring Harbor, N.Y. CURRENT PROTOCOLS IN MOLECULAR BIOLOGY (F. M. Ausubel, et al. eds., (2003)); the series METHODS IN ENZYMOLOGY (Academic Press, Inc.): PCR 2: A PRACTICAL APPROACH (M. J. MacPherson, B. D. Hames and G. R. Taylor eds. (1995)), Harlow and Lane, eds. (1988) ANTIBODIES, A LABORATORY MANUAL, and ANIMAL CELL CULTURE (R. I. Freshney, ed. (1987)); Oligonucleotide Synthesis (M. J. Gait, ed., 1984); Methods in Molecular Biology, Humana Press; Cell Biology: A Laboratory Notebook (J. E. Cellis, ed., 1998) Academic Press; Animal Cell Culture (R. I. Freshney), ed., 1987); Introduction to Cell and Tissue Culture (J. P. Mather and P. E. Roberts, 1998) Plenum Press; Cell and Tissue Culture Laboratory Procedures (A. Doyle, J. B. Griffiths, and D. G. Newell, eds., 1993-8) J. Wiley and Sons; Handbook of Experimental Immunology (D. M. Weir and C. C. Blackwell, eds.); Gene Transfer Vectors for Mammalian Cells (J. M. Miller and M. P. Calos, eds., 1987); PCR: The Polymerase Chain Reaction, (Mullis et al., eds., 1994); Current Protocols in Immunology (J. E. Coligan et al., eds., 1991); Short Protocols in Molecular Biology (Wiley and Sons, 1999); Immunobiology (C. A. Janeway and P. Travers, 1997); Antibodies (P. Finch, 1997); Antibodies: A Practical Approach (D. Catty., ed., IRL Press, 1988-1989); Monoclonal Antibodies: A Practical Approach (P. Shepherd and C. Dean, eds., Oxford University Press, 2000); Using Antibodies: A Laboratory Manual (E. Harlow and D. Lane (Cold Spring Harbor Laboratory Press, 1999); The Antibodies (M. Zanetti and J. D. Capra, eds., Harwood Academic Publishers, 1995); and Cancer: Principles and Practice of Oncology (V. T. DeVita et al., eds., J. B. Lippincott Company, 1993); and updated versions thereof.

[0139] The section headings used herein are for organizational purposes only and are not to be construed as limiting the subject matter described.

### I. DEFINITIONS

[0140] Unless otherwise defined, scientific and technical terms used in connection with the present disclosure shall have the meanings that are commonly understood by those of ordinary skill in the art. Further, unless otherwise required by context or expressly indicated, singular terms shall include pluralities and plural terms shall include the singular. For any conflict in definitions between various sources or references, the definition provided herein will control.

[0141] It is understood that embodiments of the invention described herein include “consisting” and/or “consisting essentially of” embodiments. As used herein, the singular form “a”, “an”, and “the” includes plural references unless indicated otherwise. Use of the term “or” herein is not meant to imply that alternatives are mutually exclusive.

[0142] In this application, the use of “or” means “and/or” unless expressly stated or understood by one skilled in the art. In the context of a multiple dependent claim, the use of “or” refers back to more than one preceding independent or dependent claim.

[0143] The term “about” as used herein refers to the usual error range for the respective value readily known to the skilled person in this technical field. Reference to “about” a value or parameter herein includes (and describes) embodiments that are directed to that value or parameter per se. For example, description referring to “about X” includes description of “X”.

[0144] The terms “nucleic acid molecule”, “nucleic acid” and “polynucleotide” may be used interchangeably, and refer to a polymer of nucleotides. Such polymers of nucleotides may contain natural and/or non-natural nucleotides, and include, but are not limited to, DNA, RNA, and PNA. “Nucleic acid sequence” refers to the linear sequence of nucleotides comprised in the nucleic acid molecule or polynucleotide.

[0145] The term “isolated polynucleotide” as used herein shall mean a polynucleotide of genomic, cDNA, or synthetic origin or some combination thereof, which by virtue of its origin (1) is not associated with all or a portion of a polynucleotide found in nature, (2) is operably linked to a polynucleotide that it is not linked to in nature, or (3) does not occur in nature as part of a larger sequence.

[0146] The terms “polypeptide” and “protein” are used interchangeably to refer to a polymer of amino acid residues, and are not limited to a minimum length. Such polymers of amino acid residues may contain natural or non-natural amino acid residues, and include, but are not limited to, peptides, oligopeptides, dimers, trimers, and multimers of amino acid residues. Both full-length proteins and fragments thereof are encompassed by the definition. The terms also include post-expression modifications of the polypeptide, for example, glycosylation, sialylation, acetylation, phosphorylation, and the like. Furthermore, for purposes of the present disclosure, a “polypeptide” refers to a protein which includes modifications, such as deletions, additions, and substitutions (generally conservative in nature), to the native sequence, as long as the protein maintains the desired activity. These modifications may be deliberate, as through site-directed mutagenesis, or may be accidental, such as through mutations of hosts which produce the proteins or errors due to PCR amplification.

[0147] The term “isolated protein” referred to herein means that a subject protein (1) is free of at least some other proteins with which it would typically be found in nature, (2) is essentially free of other proteins from the same source, e.g., from the same species, (3) is expressed by a cell from a different species, (4) has been separated from at least about 50 percent of polynucleotides, lipids, carbohydrates, or other materials with which it is associated in nature, (5) is not associated (by covalent or noncovalent interaction) with portions of a protein with which the “isolated protein” is associated in nature, (6) is operably associated (by covalent or noncovalent interaction) with a polypeptide with which it is not associated in nature, or (7) does not occur in nature. Such an isolated protein can be encoded by genomic DNA, cDNA, mRNA or other RNA, of may be of synthetic origin, or any combination thereof. In certain embodiments, the isolated protein is substantially pure or substantially free from proteins or polypeptides or other contaminants that are found in its natural environment that would interfere with its use (therapeutic, diagnostic, prophylactic, research or otherwise).

[0148] As used herein, “substantially pure” means an object species is the predominant species present (i.e., on a molar basis it is more abundant than any other individual species in the composition), and a substantially purified fraction is a composition wherein the object species comprises at least about 50 percent (on a molar basis) of all macromolecular species present. Generally, a substantially pure composition will comprise more than about 80 percent of all macromolecular species present in the composition, for example, in some embodiments, more than about 85%, 90%, 95%, and 99%. In some embodiments, the object species is purified to essential homogeneity (contaminant species cannot be detected in the composition by conventional detection methods) wherein the composition consists essentially of a single macromolecular species.

[0149] The term “operably linked” as used herein refers to positions of components so described are in a relationship permitting them to function in their intended manner. A control sequence “operably linked” to a coding sequence is ligated in such a way that expression of the coding sequence is achieved under conditions compatible with the control sequences.

[0150] The term “specifically binds” to an antigen or epitope is a term that is well understood in the art, and methods to determine such specific binding are also well known in the art. A molecule is said to exhibit “specific binding” or “preferential binding” if it reacts or associates more frequently, more rapidly, with greater duration and/or with greater affinity with a particular cell or substance than it does with alternative cells or substances. A single-domain antibody (sdAb) or VHH-containing polypeptide “specifically binds” or “preferentially binds” to a target if it binds with greater affinity, avidity, more readily, and/or with greater duration than it binds to other substances. For example, a sdAb or VHH-containing polypeptide that specifically or preferentially binds to a B7H3 epitope is a sdAb or VHH-containing polypeptide that binds this epitope with greater affinity, avidity, more readily, and/or with greater duration than it binds to other B7H3 epitopes or non-B7H3 epitopes. It is also understood by reading this definition that; for example, a sdAb or VHH-containing polypeptide that specifically or preferentially binds to a first target may or may not specifically or preferentially bind to a second target. As such, “specific binding” or “preferential binding” does not necessarily require (although it can include) exclusive binding. Generally, but not necessarily, reference to binding means preferential binding. “Specificity” refers to the ability of a binding protein to selectively bind an antigen.

[0151] As used herein, the term “epitope” refers to a site on a target molecule (for example, an antigen, such as a protein, nucleic acid, carbohydrate or lipid) to which an antigen-binding molecule (for example, a sdAb or VHH-containing polypeptide) binds. Epitopes often include a chemically active surface grouping of molecules such as amino acids, polypeptides or sugar side chains and have specific three-dimensional structural characteristics as well as specific charge characteristics. Epitopes can be formed both from contiguous and/or juxtaposed noncontiguous residues (for example, amino acids, nucleotides, sugars, lipid moiety) of the target molecule. Epitopes formed from contiguous residues (for example, amino acids, nucleotides, sugars, lipid moiety) typically are retained on exposure to denaturing solvents whereas epitopes formed by tertiary folding typically are lost on treatment with denaturing solvents. An epitope may include but is not limited to at least 3, at least 5 or 8-10 residues (for example, amino acids or nucleotides). In some embodiments, an epitope is less than 20 residues (for example, amino acids or nucleotides) in length, less than 15 residues or less than 12 residues. Two antibodies may bind the same epitope within an antigen if they exhibit competitive binding for the antigen. In some embodiments, an epitope can be identified by a certain minimal distance to a CDR residue on the antigen-binding molecule. In some embodiments, an epitope can be identified by the above distance, and further limited to those residues involved in a bond (for example, a hydrogen bond) between a residue of the antigen-binding molecule and an antigen residue. An epitope can be identified by various scans as well, for example an alanine or arginine scan can indicate one or more residues that the antigen-binding molecule can interact with. Unless explicitly denoted, a set of residues as an epitope does not exclude other residues from being part of the epitope for a particular antigen-binding molecule. Rather, the presence of such a set designates a minimal series (or set of species) of epitopes. Thus, in some embodiments, a set of residues identified as an epitope designates a minimal epitope of relevance for the antigen, rather than an exclusive list of residues for an epitope on an antigen.

[0152] A “nonlinear epitope” or “conformational epitope” comprises noncontiguous polypeptides, amino acids and/or sugars within the antigenic protein to which an antigen-binding molecule specific to the epitope binds. In some embodiments, at least one of the residues will be noncontiguous with the other noted residues of the epitope; however, one or more of the residues can also be contiguous with the other residues.

[0153] A “linear epitope” comprises contiguous polypeptides, amino acids and/or sugars within the antigenic protein to which an antigen-binding molecule specific to the epitope binds. It is noted that, in some embodiments, not every one of the residues within the linear epitope need be directly bound (or involved in a bond) by the antigen-binding molecule. In some embodiments, linear epitopes can be from immunizations with a peptide that effectively consisted of the sequence of the linear epitope, or from structural sections of a protein that are relatively isolated from the remainder of the protein (such that the antigen-binding molecule can interact, at least primarily), just with that sequence section.

[0154] The terms “antibody” and “antigen-binding molecule” are used interchangeably in the broadest sense and encompass various polypeptides that comprise antibody-like antigen-binding domains, including but not limited to conventional antibodies (typically comprising at least one heavy chain and at least one light chain), single-domain antibodies (sdAbs, comprising just one chain, which is typically similar to a heavy chain), VHH-containing polypeptides (polypeptides comprising at least one heavy chain only antibody variable domain, or VHH), and fragments of any of the foregoing so long as they exhibit the desired antigen-binding activity. In some embodiments, an antibody comprises a dimerization domain. Such dimerization domains include, but are not limited to, heavy chain constant domains (comprising CH1, hinge, CH2, and CH3, where CH1 typically pairs with a light chain constant domain, CL, while the hinge mediates dimerization) and Fc domains (comprising hinge, CH2, and CH3, where the hinge mediates dimerization).

[0155] The term antibody also includes, but is not limited to, chimeric antibodies, humanized antibodies, and antibodies of various species such as camelid (including llama), shark, mouse, human, cynomolgus monkey, etc.

[0156] The term “variable region” or “variable domain” refers to the domain of an antibody heavy or light chain that is involved in binding the antibody to antigen. The variable regions of the heavy chain and light chain (V_{H} and V_{L}, respectively) of a native antibody generally have similar structures, with each domain comprising four conserved framework regions (FRs) and three CDRs. (See, e.g., Kindt et al. Kuby Immunology, 6th ed., W. H. Freeman and Co., page 91 (2007). A single V_{H} or V_{L} domain may be sufficient to confer antigen-binding specificity, e.g. a single domain antibody, such as a VHH. Furthermore, antibodies that bind a particular antigen may be isolated using a V_{H} or V_{L} domain from an antibody that binds the antigen to screen a library of complementary V_{L} or V_{H} domains, respectively. See, e.g., Portolano et al., J. Immunol. 150:880-887 (1993); Clarkson et al., Nature 352:624-628 (1991).

[0157] An “antibody fragment” or “antigen-binding fragment” refers to a molecule other than a conventional or intact antibody that comprises a portion of an conventional or intact antibody containing at least a variable region that binds an antigen. Examples of antibody fragments include but are not limited to Fv, single chain Fvs (sdFvs), Fab, Fab′, Fab′-SH, F(ab′)₂; diabodies; linear antibodies; an single-domain antibodies comprising only the V_{H} region (VHH).

[0158] As used herein, “monovalent” with reference to a binding molecule refers to binding molecules that have a single antigen recognition site that is specific for a target antigen. Examples of monovalent binding molecules include, for example, a monovalent antibody fragment, a proteinaceous binding molecule with antibody-like binding properties or an MHC molecule. Examples of monovalent antibody fragments include, but are not limited to, a Fab fragment, an Fv fragment, and a single-chain Fv fragment (scFv).

[0159] The terms “single domain antibody”, “sdAb,” “VHH” are used interchangeably herein to refer to an antibody having a single monomeric domain antigen binding/recognition domain. Such antibodies include a camelid antibody or shark antibody. In some embodiments, a VHH comprises three CDRs and four framework regions, designated FR1, CDR1, FR2, CDR2, FR3, CDR3, and FR4. In some embodiments, a VHH may be truncated at the N-terminus or C-terminus such that it comprise only a partial FR1 and/or FR4, or lacks one or both of those framework regions, so long as the VHH substantially maintains antigen binding and specificity.

[0160] The term “VHH-containing polypeptide” refers to a polypeptide that comprises at least one VHH domain. In some embodiments, a VHH polypeptide comprises two, three, or four or more VHH domains, wherein each VHH domain may be the same or different. In some embodiments, a VHH-containing polypeptide comprises an Fc domain. In some such embodiments, the VHH polypeptide may form a dimer. Nonlimiting structures of VHH-containing polypeptides include VHH₁-Fc, VHH₁-VHH₂-Fc, and VHH₁-VHH₂-VHH₃-Fc, wherein VHH₁, VHH₂, and VHH₃ may be the same or different. In some embodiments of such structures, one VHH may be connected to another VHH by a linker, or one VHH may be connected to the Fc by a linker. In some such embodiments, the linker comprises 1-20 amino acids, preferably 1-20 amino acids predominantly composed of glycine and, optionally, serine. In some embodiments, when a VHH-containing polypeptide comprises an Fc, it forms a dimer. Thus, the structure VHH₁-VHH₂-Fc, if it forms a dimer, is considered to be tetravalent (i.e., the dimer has four VHH domains). Similarly, the structure VHH₁-VHH₂-VHH₃-Fc, if it forms a dimer, is considered to be hexavalent (i.e., the dimer has six VHH domains).

[0161] As used herein, a B7H3-binding polypeptide is a polypeptide or protein that specifically binds B7H3. Typically, a B7H3-binding polypeptide herein is a VHH-containing polypeptide containing at least one VHH domain that binds B7H3. A B7H3-binding polypeptide includes conjugates, including fusion proteins. A B7H3-binding polypeptide includes fusion proteins, including those containing an Fc domain. In some embodiments, a B7H3-binding polypeptide contains two, three, or four or more VHH domains that each specifically bind to B7H3, wherein each VHH domain may be the same or different. In some embodiments, a B7H3-binidng polypeptide is multivalent. In some embodiments, a B7H3-binding polypeptide is multispecific. In some cases, a B7H3-binding polypeptide may contain one or more additional domains that bind to one or more further or additional antigens other than B7H3.

[0162] The term “monoclonal antibody” refers to an antibody (including an sdAb or VHH-containing polypeptide) of a substantially homogeneous population of antibodies, that is, the individual antibodies comprising the population are identical except for possible naturally-occurring mutations that may be present in minor amounts. Monoclonal antibodies are highly specific, being directed against a single antigenic site. Furthermore, in contrast to polyclonal antibody preparations, which typically include different antibodies directed against different determinants (epitopes), each monoclonal antibody is directed against a single determinant on the antigen. Thus, a sample of monoclonal antibodies can bind to the same epitope on the antigen. The modifier “monoclonal” indicates the character of the antibody as being obtained from a substantially homogeneous population of antibodies, and is not to be construed as requiring production of the antibody by any particular method. For example, the monoclonal antibodies may be made by the hybridoma method first described by Kohler and Milstein, 1975, Nature 256:495, or may be made by recombinant DNA methods such as described in U.S. Pat. No. 4,816,567. The monoclonal antibodies may also be isolated from phage libraries generated using the techniques described in McCafferty et al., 1990, Nature 348:552-554, for example.

[0163] The term “CDR” denotes a complementarity determining region as defined by at least one manner of identification to one of skill in the art. The precise amino acid sequence boundaries of a given CDR or FR can be readily determined using any of a number of well-known schemes, including those described by Kabat et al. (1991), “Sequences of Proteins of Immunological Interest,” 5th Ed. Public Health Service, National Institutes of Health, Bethesda, MD (“Kabat” numbering scheme); Al-Lazikani et al., (1997) JMB 273,927-948 (“Chothia” numbering scheme); MacCallum et al., J. Mol. Biol. 262:732-745 (1996), “Antibody-antigen interactions: Contact analysis and binding site topography,” J. Mol. Biol. 262, 732-745.” (“Contact” numbering scheme); Lefranc MP et al., “IMGT unique numbering for immunoglobulin and T cell receptor variable domains and Ig superfamily V-like domains,” Dev Comp Immunol, 2003 January; 27(1):55-77 (“IMGT” numbering scheme); Honegger A and Plückthun A, “Yet another numbering scheme for immunoglobulin variable domains: an automatic modeling and analysis tool,” J Mol Biol, 2001 Jun. 8; 309(3):657-70, (“Aho” numbering scheme); and Martin et al., “Modeling antibody hypervariable loops: a combined algorithm,” PNAS, 1989, 86(23):9268-9272, (“AbM” numbering scheme).

[0164] The boundaries of a given CDR or FR may vary depending on the scheme used for identification. For example, the Kabat scheme is based on structural alignments, while the Chothia scheme is based on structural information. Numbering for both the Kabat and Chothia schemes is based upon the most common antibody region sequence lengths, with insertions accommodated by insertion letters, for example, “30a,” and deletions appearing in some antibodies. The two schemes place certain insertions and deletions (“indels”) at different positions, resulting in differential numbering. The Contact scheme is based on analysis of complex crystal structures and is similar in many respects to the Chothia numbering scheme. The AbM scheme is a compromise between Kabat and Chothia definitions based on that used by Oxford Molecular's AbM antibody modeling software.

[0165] In some embodiments, CDRs can be defined in accordance with any of the Chothia numbering schemes, the Kabat numbering scheme, a combination of Kabat and Chothia, the AbM definition, and/or the contact definition. A VHH comprises three CDRs, designated CDR1, CDR2, and CDR3. Table 1, below, lists exemplary position boundaries of CDR-H1, CDR-H2, CDR-H3 as identified by Kabat, Chothia, AbM, and Contact schemes, respectively. For CDR-H1, residue numbering is listed using both the Kabat and Chothia numbering schemes. FRs are located between CDRs, for example, with FR-H1 located before CDR-H1, FR-H2 located between CDR-H1 and CDR-H2, FR-H3 located between CDR-H2 and CDR-H3 and so forth. It is noted that because the shown Kabat numbering scheme places insertions at H35A and H35B, the end of the Chothia CDR-H1 loop when numbered using the shown Kabat numbering convention varies between H32 and H34, depending on the length of the loop.

TABLE 1
Boundaries of CDRs according to various numbering schemes.

| CDR | Kabat | Chothia | AbM | Contact |
|---|---|---|---|---|
| CDR-H1 | H31--H35B | H26--H32 . . . 34 | H26--H35B | H30--H35B |
| (Kabat Numbering¹) | | | | |
| CDR-H1 | H31--H35 | H26--H32 | H26--H35 | H30--H35 |
| (Chothia Numbering²) | | | | |
| CDR-H2 | H50--H65 | H52--H56 | H50--H58 | H47--H58 |
| CDR-H3 | H95--H102 | H95--H102 | H95--H102 | H93--H101 |

¹Kabat et al. (1991), “Sequences of Proteins of Immunological Interest,” 5th Ed. Public Health Service, National Institutes of Health, Bethesda, MD
²Al-Lazikani et al., (1997) JMB 273,927-948

[0166] Thus, unless otherwise specified, a “CDR” or “complementary determining region,” or individual specified CDRs (e.g., CDR-H1, CDR-H2, CDR-H3), of a given antibody or region thereof, such as a variable region thereof, should be understood to encompass a (or the specific) complementary determining region as defined by any of the aforementioned schemes. For example, where it is stated that a particular CDR (e.g., a CDR-H3) contains the amino acid sequence of a corresponding CDR in a given VHH amino acid sequence, it is understood that such a CDR has a sequence of the corresponding CDR (e.g., CDR-H3) within the VHH, as defined by any of the aforementioned schemes. In some embodiments, specific CDR sequences are specified. Exemplary CDR sequences of provided antibodies are described using various numbering schemes (see e.g. Table 1), although it is understood that a provided antibody can include CDRs as described according to any of the other aforementioned numbering schemes or other numbering schemes known to a skilled artisan.

[0167] As used herein, “conjugate,” “conjugation” or grammatical variations thereof refers the joining or linking together of two or more compounds resulting in the formation of another compound, by any joining or linking methods known in the art. It can also refer to a compound which is generated by the joining or linking together two or more compounds. For example, a VHH domain linked directly or indirectly to one or more chemical moieties or polypeptide is an exemplary conjugate. Such conjugates include fusion proteins, those produced by chemical conjugates and those produced by any other methods.

[0168] An immunoglobulin Fc fusion (“Fc-fusion”), such as VHH-Fc, is a molecule comprising one or more VHH domains operably linked to an Fc region of an immunoglobulin. An immunoglobulin Fc region may be linked indirectly or directly to one or more VHH domains. Various linkers are known in the art and can optionally be used to link an Fc to a fusion partner to generate an Fc-fusion. In some such embodiments, the linker comprises 1-20 amino acids, preferably 1-20 amino acids predominantly composed of glycine and, optionally, serine. Fc-fusions of identical species can be dimerized to form Fc-fusion homodimers, or using non-identical species to form Fc-fusion heterodimers. In some embodiments, the Fc is a mammalian Fc such as human Fc.

[0169] The term “heavy chain constant region” as used herein refers to a region comprising at least three heavy chain constant domains, C_{H}1, hinge, C_{H}2, and C_{H}3. Of course, non-function-altering deletions and alterations within the domains are encompassed within the scope of the term “heavy chain constant region,” unless designated otherwise. Nonlimiting exemplary heavy chain constant regions include γ, δ, and α. Nonlimiting exemplary heavy chain constant regions also include ε and μ. Each heavy constant region corresponds to an antibody isotype. For example, an antibody comprising a γconstant region is an IgG antibody, an antibody comprising a δ constant region is an IgD antibody, and an antibody comprising an α constant region is an IgA antibody. Further, an antibody comprising a μ constant region is an IgM antibody, and an antibody comprising an ε constant region is an IgE antibody. Certain isotypes can be further subdivided into subclasses. For example, IgG antibodies include, but are not limited to, IgG1 (comprising a γ₁ constant region), IgG2 (comprising a γ₂ constant region), IgG3 (comprising a γ₃ constant region), and IgG4 (comprising a γ₄ constant region) antibodies; IgA antibodies include, but are not limited to, IgA1 (comprising an α₁ constant region) and IgA2 (comprising an α₂ constant region) antibodies; and IgM antibodies include, but are not limited to, IgM1 and IgM2.

[0170] A “Fc region” as used herein refers to a portion of a heavy chain constant region comprising CH2 and CH3. In some embodiments, an Fc region comprises a hinge, CH2, and CH3. In various embodiments, when an Fc region comprises a hinge, the hinge mediates dimerization between two Fc-containing polypeptides. An Fc region may be of any antibody heavy chain constant region isotype discussed herein. In some embodiments, an Fc region is an IgG1, IgG2, IgG3, or IgG4.

[0171] A “functional Fc region” possesses an “effector function” of a native sequence Fc region. Exemplary “effector functions” include Fc receptor binding; C1q binding and complement dependent cytotoxicity (CDC); Fc receptor binding; antibody-dependent cell-mediated cytotoxicity (ADCC); phagocytosis; down regulation of cell surface receptors (for example B-cell receptor); and B-cell activation, etc. Such effector functions generally require the Fc region to be combined with a binding domain (for example, an antibody variable domain) and can be assessed using various assays.

[0172] A “native sequence Fc region” comprises an amino acid sequence identical to the amino acid sequence of an Fc region found in nature. Native sequence human Fc regions include a native sequence human IgG1 Fc region (non-A and A allotypes); native sequence human IgG2 Fc region; native sequence human IgG3 Fc region; and native sequence human IgG4 Fc region as well as naturally occurring variants thereof.

[0173] A “variant Fc region” comprises an amino acid sequence which differs from that of a native sequence Fc region by virtue of at least one amino acid modification. In some embodiments, a “variant Fc region” comprises an amino acid sequence which differs from that of a native sequence Fc region by virtue of at least one amino acid modification, yet retains at least one effector function of the native sequence Fc region. In some embodiments, the variant Fc region has at least one amino acid substitution compared to a native sequence Fc region or to the Fc region of a parent polypeptide, for example, from about one to about ten amino acid substitutions, and preferably, from about one to about five amino acid substitutions in a native sequence Fc region or in the Fc region of the parent polypeptide. In some embodiments, the variant Fc region herein will possess at least about 80% sequence identity with a native sequence Fc region and/or with an Fc region of a parent polypeptide, at least about 90% sequence identity therewith, at least about 95%, at least about 96%, at least about 97%, at least about 98%, or at least about 99% sequence identity therewith.

[0174] In general, the numbering of the residues in an immunoglobulin heavy chain or portion thereof, such as an Fc region, is that of the EU index as in Kabat et al., Sequences of Proteins of Immunological Interest, 5th Ed. Public Health Service, National Institutes of Health, Bethesda, Md. (1991). The “EU index as in Kabat” refers to the residue numbering of the human IgG1 EU antibody.

[0175] “Fc receptor” or “FcR” describes a receptor that binds to the Fc region of an antibody. In some embodiments, an FcγR is a native human FcR. In some embodiments, an FcR is one which binds an IgG antibody (a gamma receptor) and includes receptors of the FcγRI, FcγRII, and FcγRIII subclasses, including allelic variants and alternatively spliced forms of those receptors. FcγRII receptors include FcγRIIA (an “activating receptor”) and FcγRIIB (an “inhibiting receptor”), which have similar amino acid sequences that differ primarily in the cytoplasmic domains thereof. Activating receptor FcγRIIA contains an immunoreceptor tyrosine-based activation motif (ITAM) in its cytoplasmic domain Inhibiting receptor FcγRIIB contains an immunoreceptor tyrosine-based inhibition motif (ITIM) in its cytoplasmic domain. (See, for example, Daeron, Annu. Rev. Immunol. 15:203-234 (1997)). FcRs are reviewed, for example, in Ravetch and Kinet, Annu. Rev. Immunol 9:457-92 (1991); Capel et al., Immunomethods 4:25-34 (1994); and de Haas et al., J. Lab. Clin. Med. 126:330-41 (1995). Other FcRs, including those to be identified in the future, are encompassed by the term “FcR” herein. For example, the term “Fc receptor” or “FcR” also includes the neonatal receptor, FcRn, which is responsible for the transfer of maternal IgGs to the fetus (Guyer et al., J. Immunol. 117:587 (1976) and Kim et al., J. Immunol. 24:249 (1994)) and regulation of homeostasis of immunoglobulins. Methods of measuring binding to FcRn are known (see, for example, Ghetie and Ward, Immunol. Today 18(12):592-598 (1997); Ghetie et al., Nature Biotechnology, 15(7):637-640 (1997); Hinton et al., J. Biol. Chem. 279(8):6213-6216 (2004); WO 2004/92219 (Hinton et al.).

[0176] An “acceptor human framework” as used herein is a framework comprising the amino acid sequence of a heavy chain variable domain (V_{H}) framework derived from a human immunoglobulin framework or a human consensus framework, as discussed herein. An acceptor human framework derived from a human immunoglobulin framework or a human consensus framework can comprise the same amino acid sequence thereof, or it can contain amino acid sequence changes. In some embodiments, the number of amino acid changes are fewer than 10, or fewer than 9, or fewer than 8, or fewer than 7, or fewer than 6, or fewer than 5, or fewer than 4, or fewer than 3, across all of the human frameworks in a single antigen binding domain, such as a VHH.

[0177] As used herein, a “chimeric antigen receptor” or “CAR” refers to an engineered receptor, which introduces an antigen specificity, via an antigen binding domain, onto cells to which it is engineered (for example T cells such as naive T cells, central memory T cells, effector memory T cells or combination thereof) thus combining the antigen binding properties of the antigen binding domain with the T cell activity (e.g. lytic capacity and self renewal) of T cells. A CAR typically includes an extracellular antigen-binding domain (ectodomain), a transmembrane domain and an intracellular signaling domain. The intracellular signaling domain generally contains at least one ITAM signaling domain, e.g. derived from CD3zeta, and optionally at least one costimulatory signaling domain, e.g. derived from CD28 or 4-1BB. In a CAR provided herein, a VHH domain forms the antigen binding domain and is located at the extracellular side when expressed in a cell.

[0178] “Affinity” refers to the strength of the sum total of noncovalent interactions between a single binding site of a molecule (for example, an antibody or VHH-containing polypeptide) and its binding partner (for example, an antigen). The affinity or the apparent affinity of a molecule X for its partner Y can generally be represented by the dissociation constant (K_{D}) or the K_{D-apparent}, respectively. Affinity can be measured by common methods known in the art (such as, for example, ELISA K_{D}, KinExA, flow cytometry, and/or surface plasmon resonance devices), including those described herein. Such methods include, but are not limited to, methods involving BIAcore®, Octet®, or flow cytometry.

[0179] The term “K_{D}”, as used herein, refers to the equilibrium dissociation constant of an antigen-binding molecule/antigen interaction. When the term “K_{D}” is used herein, it includes K_{D} and K_{D-apparent}.

[0180] In some embodiments, the K_{D} of the antigen-binding molecule is measured by flow cytometry using an antigen-expressing cell line and fitting the mean fluorescence measured at each antibody concentration to a non-linear one-site binding equation (Prism Software graphpad). In some such embodiments, the K_{D} is K_{D-apparent}.

[0181] The term “biological activity” refers to any one or more biological properties of a molecule (whether present naturally as found in vivo, or provided or enabled by recombinant means). Biological properties include, but are not limited to, binding a ligand, inducing or increasing cell proliferation (such as T cell proliferation), and inducing or increasing expression of cytokines.

[0182] An “affinity matured” VHH-containing polypeptide refers to a VHH-containing polypeptide with one or more alterations in one or more CDRs compared to a parent VHH-containing polypeptide that does not possess such alterations, such alterations resulting in an improvement in the affinity of the VHH-containing polypeptide for antigen.

[0183] A “humanized VHH” as used herein refers to a VHH in which one or more framework regions have been substantially replaced with human framework regions. In some instances, certain framework region (FR) residues of the human immunoglobulin are replaced by corresponding non-human residues. Furthermore, the humanized VHH can comprise residues that are found neither in the original VHH nor in the human framework sequences, but are included to further refine and optimize VHH or VHH-containing polypeptide performance. In some embodiments, a humanized VHH-containing polypeptide comprises a human Fc region. As will be appreciated, a humanized sequence can be identified by its primary sequence and does not necessarily denote the process by which the antibody was created.

[0184] The term “substantially similar” or “substantially the same,” as used herein, denotes a sufficiently high degree of similarity between two or more numeric values such that one of skill in the art would consider the difference between the two or more values to be of little or no biological and/or statistical significance within the context of the biological characteristic measured by said value. In some embodiments the two or more substantially similar values differ by no more than about any one of 5%, 10%, 15%, 20%, 25%, or 50%.

[0185] A polypeptide “variant” means a biologically active polypeptide having at least about 80% amino acid sequence identity with the native sequence polypeptide after aligning the sequences and introducing gaps, if necessary, to achieve the maximum percent sequence identity, and not considering any conservative substitutions as part of the sequence identity. Such variants include, for instance, polypeptides wherein one or more amino acid residues are added, or deleted, at the N- or C-terminus of the polypeptide. In some embodiments, a variant will have at least about 80% amino acid sequence identity. In some embodiments, a variant will have at least about 90% amino acid sequence identity. In some embodiments, a variant will have at least about 95% amino acid sequence identity with the native sequence polypeptide.

[0186] As used herein, “percent (%) amino acid sequence identity” and “homology” with respect to a peptide, polypeptide or antibody sequence are defined as the percentage of amino acid residues in a candidate sequence that are identical with the amino acid residues in the specific peptide or polypeptide sequence, after aligning the sequences and introducing gaps, if necessary, to achieve the maximum percent sequence identity, and not considering any conservative substitutions as part of the sequence identity. Alignment for purposes of determining percent amino acid sequence identity can be achieved in various ways that are within the skill in the art, for instance, using publicly available computer software such as BLAST, BLAST-2, ALIGN or MEGALIGN™ (DNASTAR) software. Those skilled in the art can determine appropriate parameters for measuring alignment, including any algorithms needed to achieve maximal alignment over the full length of the sequences being compared.

[0187] An amino acid substitution may include but are not limited to the replacement of one amino acid in a polypeptide with another amino acid. Exemplary substitutions are shown in Table 2. Amino acid substitutions may be introduced into an antibody of interest and the products screened for a desired activity, for example, retained/improved antigen binding, decreased immunogenicity, or improved ADCC or CDC.

TABLE 2

| Original | |
|---|---|
| Residue | Exemplary Substitutions |
| Ala (A) | Val; Leu; Ile |
| Arg (R) | Lys; Gln; Asn |
| Asn (N) | Gln; His; Asp, Lys; Arg |
| Asp (D) | Glu; Asn |
| Cys (C) | Ser; Ala |
| Gln (Q) | Asn; Glu |
| Glu (E) | Asp; Gln |
| Gly (G) | Ala |
| His (H) | Asn; Gln; Lys; Arg |
| Ile (I) | Leu; Val; Met; Ala; Phe; Norleucine |
| Leu (L) | Norleucine; Ile; Val; Met; Ala; Phe |
| Lys (K) | Arg; Gln; Asn |
| Met (M) | Leu; Phe; Ile |
| Phe (F) | Trp; Leu; Val; Ile; Ala; Tyr |
| Pro (P) | Ala |
| Ser (S) | Thr |
| Thr (T) | Val; Ser |
| Trp (W) | Tyr; Phe |
| Tyr (Y) | Trp; Phe; Thr; Ser |
| Val (V) | Ile; Leu; Met; Phe; Ala; Norleucine |

[0188] Amino acids may be grouped according to common side-chain properties:
[0189] (1) hydrophobic: Norleucine, Met, Ala, Val, Leu, Ile;
[0190] (2) neutral hydrophilic: Cys, Ser, Thr, Asn, Gln;
[0191] (3) acidic: Asp, Glu;
[0192] (4) basic: His, Lys, Arg;
[0193] (5) residues that influence chain orientation: Gly, Pro;
[0194] (6) aromatic: Trp, Tyr, Phe.

[0195] Non-conservative substitutions will entail exchanging a member of one of these classes for another class.

[0196] The term “vector” is used to describe a polynucleotide that can be engineered to contain a cloned polynucleotide or polynucleotides that can be propagated in a host cell. A vector can include one or more of the following elements: an origin of replication, one or more regulatory sequences (such as, for example, promoters and/or enhancers) that regulate the expression of the polypeptide of interest, and/or one or more selectable marker genes (such as, for example, antibiotic resistance genes and genes that can be used in colorimetric assays, for example, β-galactosidase). The term “expression vector” refers to a vector that is used to express a polypeptide of interest in a host cell.

[0197] A “host cell” refers to a cell that may be or has been a recipient of a vector or isolated polynucleotide. Host cells may be prokaryotic cells or eukaryotic cells. Exemplary eukaryotic cells include mammalian cells, such as primate or non-primate animal cells; fungal cells, such as yeast; plant cells; and insect cells. Nonlimiting exemplary mammalian cells include, but are not limited to, NSO cells, PER.C6® cells (Crucell), and 293 and CHO cells, and their derivatives, such as 293-6E, CHO-DG44, CHO-K1, CHO-S, and CHO-DS cells. Host cells include progeny of a single host cell, and the progeny may not necessarily be completely identical (in morphology or in genomic DNA complement) to the original parent cell due to natural, accidental, or deliberate mutation. A host cell includes cells transfected in vivo with a polynucleotide(s) a provided herein.

[0198] The term “isolated” as used herein refers to a molecule that has been separated from at least some of the components with which it is typically found in nature or produced. For example, a polypeptide is referred to as “isolated” when it is separated from at least some of the components of the cell in which it was produced. Where a polypeptide is secreted by a cell after expression, physically separating the supernatant containing the polypeptide from the cell that produced it is considered to be “isolating” the polypeptide Similarly, a polynucleotide is referred to as “isolated” when it is not part of the larger polynucleotide (such as, for example, genomic DNA or mitochondrial DNA, in the case of a DNA polynucleotide) in which it is typically found in nature, or is separated from at least some of the components of the cell in which it was produced, for example, in the case of an RNA polynucleotide. Thus, a DNA polynucleotide that is contained in a vector inside a host cell may be referred to as “isolated”.

[0199] The terms “individual” and “subject” are used interchangeably herein to refer to an animal; for example a mammal. The term patient includes human and veterinary subjects. In some embodiments, methods of treating mammals, including, but not limited to, humans, rodents, simians, felines, canines, equines, bovines, porcines, ovines, caprines, mammalian laboratory animals, mammalian farm animals, mammalian sport animals, and mammalian pets, are provided. The subject can be male or female and can be any suitable age, including infant, juvenile, adolescent, adult, and geriatric subjects. In some examples, an “individual” or “subject” refers to an individual or subject in need of treatment for a disease or disorder. In some embodiments, the subject to receive the treatment can be a patient, designating the fact that the subject has been identified as having a disorder of relevance to the treatment, or being at adequate risk of contracting the disorder. In particular embodiments, the subject is a human, such as a human patient.

[0200] A “disease” or “disorder” as used herein refers to a condition where treatment is needed and/or desired.

[0201] The term “tumor cell”, “cancer cell”, “cancer”, “tumor”, and/or “neoplasm”, unless otherwise designated, are used herein interchangeably and refer to a cell (or cells) exhibiting an uncontrolled growth and/or abnormal increased cell survival and/or inhibition of apoptosis which interferes with the normal functioning of bodily organs and systems. Included in this definition are benign and malignant cancers, polyps, hyperplasia, as well as dormant tumors or micrometastases.

[0202] The terms “cancer” and “tumor” encompass solid and hematological/lymphatic cancers and also encompass malignant, pre-malignant, and benign growth, such as dysplasia. Also, included in this definition are cells having abnormal proliferation that is not impeded (e.g. immune evasion and immune escape mechanisms) by the immune system (e.g. virus infected cells). Exemplary cancers include, but are not limited to: basal cell carcinoma, biliary tract cancer; bladder cancer; bone cancer; brain and central nervous system cancer; breast cancer; cancer of the peritoneum; cervical cancer; choriocarcinoma; colon and rectum cancer; connective tissue cancer; cancer of the digestive system; endometrial cancer; esophageal cancer; eye cancer; cancer of the head and neck; gastric cancer (including gastrointestinal cancer); glioblastoma; hepatic carcinoma; hepatoma; intra-epithelial neoplasm; kidney or renal cancer; larynx cancer; leukemia; liver cancer; lung cancer (e.g., small-cell lung cancer, non-small cell lung cancer, adenocarcinoma of the lung, and squamous carcinoma of the lung); melanoma; myeloma; neuroblastoma; oral cavity cancer (lip, tongue, mouth, and pharynx); ovarian cancer; pancreatic cancer; prostate cancer; retinoblastoma; rhabdomyosarcoma; rectal cancer; cancer of the respiratory system; salivary gland carcinoma; sarcoma; skin cancer; squamous cell cancer; stomach cancer; testicular cancer; thyroid cancer; uterine or endometrial cancer; cancer of the urinary system; vulval cancer; lymphoma including Hodgkin's and non-Hodgkin's lymphoma, as well as B-cell lymphoma (including low grade/follicular non-Hodgkin's lymphoma (NHL); small lymphocytic (SL) NHL; intermediate grade/follicular NHL; intermediate grade diffuse NHL; high grade immunoblastic NHL; high grade lymphoblastic NHL; high grade small non-cleaved cell NHL; bulky disease NHL; mantle cell lymphoma; AIDS-related lymphoma; and Waldenstrom's Macroglobulinemia; chronic lymphocytic leukemia (CLL); acute lymphoblastic leukemia (ALL); Hairy cell leukemia; chronic myeloblastic leukemia; as well as other carcinomas and sarcomas; and post-transplant lymphoproliferative disorder (PTLD), as well as abnormal vascular proliferation associated with phakomatoses, edema (such as that associated with brain tumors), and Meigs' syndrome.

[0203] The term “non-tumor cell” as used herein refers to a normal cells or tissue. Exemplary non-tumor cells include, but are not limited to: T-cells, B-cells, natural killer (NK) cells, natural killer T (NKT) cells, dendritic cells, monocytes, macrophages, epithelial cells, fibroblasts, hepatocytes, interstitial kidney cells, fibroblast-like synoviocytes, osteoblasts, and cells located in the breast, skeletal muscle, pancreas, stomach, ovary, small intestines, placenta, uterus, testis, kidney, lung, heart, brain, liver, prostate, colon, lymphoid organs, bone, and bone-derived mesenchymal stem cells. The term “a cell or tissue located in the periphery” as used herein refers to non-tumor cells not located near tumor cells and/or within the tumor microenvironment.

[0204] The term “cells or tissue within the tumor microenvironment” as used herein refers to the cells, molecules, extracellular matrix and/or blood vessels that surround and/or feed a tumor cell. Exemplary cells or tissue within the tumor microenvironment include, but are not limited to: tumor vasculature; tumor-infiltrating lymphocytes; fibroblast reticular cells; endothelial progenitor cells (EPC); cancer-associated fibroblasts; pericytes; other stromal cells; components of the extracellular matrix (ECM); dendritic cells; antigen presenting cells; T-cells; regulatory T-cells (Treg cells); macrophages; neutrophils; myeloid-derived suppressor cells (MDSCs) and other immune cells located proximal to a tumor. Methods for identifying tumor cells, and/or cells/tissues located within the tumor microenvironment are well known in the art, as described herein, below.

[0205] In some embodiments, an “increase” or “decrease” refers to a statistically significant increase or decrease, respectively. As will be clear to the skilled person, “modulating” can also involve effecting a change (which can either be an increase or a decrease) in affinity, avidity, specificity and/or selectivity of a target or antigen, for one or more of its ligands, binding partners, partners for association into a homomultimeric or heteromultimeric form, or substrates; effecting a change (which can either be an increase or a decrease) in the sensitivity of the target or antigen for one or more conditions in the medium or surroundings in which the target or antigen is present (such as pH, ion strength, the presence of co-factors, etc.); and/or cellular proliferation or cytokine production, compared to the same conditions but without the presence of a test agent. This can be determined in any suitable manner and/or using any suitable assay known per se or described herein, depending on the target involved.

[0206] As used herein, “an immune response” is meant to encompass cellular and/or humoral immune responses that are sufficient to inhibit or prevent onset or ameliorate the symptoms of disease (for example, cancer or cancer metastasis). “An immune response” can encompass aspects of both the innate and adaptive immune systems.

[0207] As used herein, the terms “treating,” “treatment,” or “therapy” of a disease, disorder or condition is an approach for obtaining beneficial or desired clinical results. “Treatment” as used herein, covers any administration or application of a therapeutic for disease in a mammal, including a human. For purposes of this disclosure, beneficial or desired clinical results include, but are not limited to, any one or more of: alleviation of one or more symptoms, diminishment of extent of disease, preventing or delaying spread (for example, metastasis, for example metastasis to the lung or to the lymph node) of disease, preventing or delaying recurrence of disease, delay or slowing of disease progression, amelioration of the disease state, inhibiting the disease or progression of the disease, inhibiting or slowing the disease or its progression, arresting its development, and remission (whether partial or total). Also encompassed by “treatment” is a reduction of pathological consequence of a proliferative disease. The methods provided herein contemplate any one or more of these aspects of treatment. In-line with the above, the term treatment does not require one-hundred percent removal of all aspects of the disorder.

[0208] As used herein in the context of cancer, the terms “treatment” or, “inhibit,” “inhibiting” or “inhibition” of cancer refers to at least one of: a statistically significant decrease in the rate of tumor growth, a cessation of tumor growth, or a reduction in the size, mass, metabolic activity, or volume of the tumor, as measured by standard criteria such as, but not limited to, the Response Evaluation Criteria for Solid Tumors (RECIST), or a statistically significant increase in progression free survival (PFS) or overall survival (OS).

[0209] “Ameliorating” means a lessening or improvement of one or more symptoms as compared to not administering a therapeutic agent. “Ameliorating” also includes shortening or reduction in duration of a symptom.

[0210] “Preventing,” “prophylaxis,” or “prevention” of a disease or disorder refers to administration of a pharmaceutical composition, either alone or in combination with another compound, to prevent the occurrence or onset of a disease or disorder or some or all of the symptoms of a disease or disorder or to lessen the likelihood of the onset of a disease or disorder.

[0211] The terms “inhibition” or “inhibit” refer to a decrease or cessation of any phenotypic characteristic or to the decrease or cessation in the incidence, degree, or likelihood of that characteristic. To “reduce” or “inhibit” is to decrease, reduce or arrest an activity, function, and/or amount as compared to a reference. In some embodiments, by “reduce” or “inhibit” is meant the ability to cause an overall decrease of 10% or greater. In some embodiments, by “reduce” or “inhibit” is meant the ability to cause an overall decrease of 50% or greater. In some embodiments, by “reduce” or “inhibit” is meant the ability to cause an overall decrease of 75%, 85%, 90%, 95%, or greater. In some embodiments, the amount noted above is inhibited or decreased over a period of time, relative to a control over the same period of time.

[0212] As used herein, “delaying development of a disease” means to defer, hinder, slow, retard, stabilize, suppress and/or postpone development of the disease (such as cancer). This delay can be of varying lengths of time, depending on the history of the disease and/or individual being treated. As is evident to one skilled in the art, a sufficient or significant delay can, in effect, encompass prevention, in that the individual does not develop the disease. For example, a late stage cancer, such as development of metastasis, may be delayed.

[0213] “Preventing,” as used herein, includes providing prophylaxis with respect to the occurrence or recurrence of a disease in a subject that may be predisposed to the disease but has not yet been diagnosed with the disease. Unless otherwise specified, the terms “reduce”, “inhibit”, or “prevent” do not denote or require complete prevention over all time, but just over the time period being measured.

[0214] The term “anti-cancer agent” is used herein in its broadest sense to refer to agents that are used in the treatment of one or more cancers. Exemplary classes of such agents in include, but are not limited to, chemotherapeutic agents, anti-cancer biologics (such as cytokines, receptor extracellular domain-Fc fusions, and antibodies), radiation therapy, CAR-T therapy, therapeutic oligonucleotides (such as antisense oligonucleotides and siRNAs) and oncolytic viruses.

[0215] The term “biological sample” means a quantity of a substance from a living thing or formerly living thing. Such substances include, but are not limited to, blood, (for example, whole blood), plasma, serum, urine, amniotic fluid, synovial fluid, endothelial cells, leukocytes, monocytes, other cells, organs, tissues, bone marrow, lymph nodes and spleen.

[0216] The term “control” or “reference” refers to a composition known to not contain an analyte (“negative control”) or to contain an analyte (“positive control”). A positive control can comprise a known concentration of analyte.

[0217] The terms “effective amount” or “therapeutically effective amount” refer to a quantity and/or concentration of a composition containing an active ingredient (e.g. sdAb or VHH-containing polypeptide) that when administered into a patient either alone (i.e., as a monotherapy) or in combination with additional therapeutic agents, yields a statistically significant decrease in disease progression as, for example, by ameliorating or eliminating symptoms and/or the cause of the disease. An effective amount may be an amount that relieves, lessens, or alleviates at least one symptom or biological response or effect associated with a disease or disorder, prevents progression of the disease or disorder, or improves physical functioning of the patient. A therapeutically effective amount of a composition containing an active agent may vary according to factors such as the disease state, age, sex, and weight of the individual, and the ability of the active agent to elicit a desired response in the individual. A therapeutically effective amount is also one in which any toxic or detrimental effects of the active agent are outweighed by the therapeutically beneficial effects. A therapeutically effective amount may be delivered in one or more administrations. A therapeutically effective amount refers to an amount effective, at dosages and for periods of time necessary, to achieve the desired therapeutic and/or prophylactic result.

[0218] As used herein, a composition refers to any mixture of two or more products, substances, or compounds, including cells. It may be a solution, a suspension, liquid, powder, a paste, aqueous, non-aqueous or any combination thereof.

[0219] The terms “pharmaceutical formulation” and “pharmaceutical composition” refer to a preparation which is in such form as to permit the biological activity of the active ingredient(s) to be effective, and which contains no additional components which are unacceptably toxic to a subject to which the formulation would be administered. Hence, it is a composition suitable for pharmaceutical use in a mammalian subject, often a human. A pharmaceutical composition typically comprises an effective amount of an active agent (e.g., sdAb or VHH-containing polypeptide) and a carrier, excipient, or diluent. The carrier, excipient, or diluent is typically a pharmaceutically acceptable carrier, excipient or diluent, respectively. Such formulations may be sterile.

[0220] A “pharmaceutically acceptable carrier” refers to a non-toxic solid, semisolid, or liquid filler, diluent, encapsulating material, formulation auxiliary, or carrier conventional in the art for use with a therapeutic agent that together comprise a “pharmaceutical composition” for administration to a subject. A pharmaceutically acceptable carrier is non-toxic to recipients at the dosages and concentrations employed and are compatible with other ingredients of the formulation. The pharmaceutically acceptable carrier is appropriate for the formulation employed.

[0221] Administration “in combination with” one or more further therapeutic agents includes simultaneous (concurrent) and sequential administration in any order.

[0222] The term “concurrently” is used herein to refer to administration of two or more therapeutic agents, where at least part of the administration overlaps in time, or where the administration of one therapeutic agent falls within a short period of time relative to administration of the other therapeutic agent, or wherein the therapeutic effect of both agents overlap for at least a period of time.

[0223] The term “sequentially” is used herein to refer to administration of two or more therapeutic agents that does not overlap in time, or wherein the therapeutic effects of the agents do not overlap.

[0224] As used herein, “in conjunction with” refers to administration of one treatment modality in addition to another treatment modality. As such, “in conjunction with” refers to administration of one treatment modality before, during, or after administration of the other treatment modality to the individual.

[0225] The term “package insert” is used to refer to instructions customarily included in commercial packages of therapeutic products, that contain information about the indications, usage, dosage, administration, combination therapy, contraindications and/or warnings concerning the use of such therapeutic products.

[0226] An “article of manufacture” is any manufacture (for example, a package or container) or kit comprising at least one reagent, for example, a medicament for treatment of a disease or disorder (for example, cancer), or a probe for specifically detecting a biomarker described herein. In some embodiments, the manufacture or kit is promoted, distributed, or sold as a unit for performing the methods described herein.

[0227] The terms “label” and “detectable label” mean a moiety attached, for example, to an antibody or antigen to render a reaction (for example, binding) between the members of the specific binding pair, detectable. The labeled member of the specific binding pair is referred to as “detectably labeled.” Thus, the term “labeled binding protein” refers to a protein with a label incorporated that provides for the identification of the binding protein. In some embodiments, the label is a detectable marker that can produce a signal that is detectable by visual or instrumental means, for example, incorporation of a radiolabeled amino acid or attachment to a polypeptide of biotinyl moieties that can be detected by marked avidin (for example, streptavidin containing a fluorescent marker or enzymatic activity that can be detected by optical or colorimetric methods). Examples of labels for polypeptides include, but are not limited to, the following: radioisotopes or radionuclides (for example, ³H, ¹⁴C, ³⁵S, ⁹⁰Y, ⁹⁹Tc, ¹¹¹In, ¹²⁵I, ¹³¹I, ¹⁷⁷Lu, ¹⁶⁶Ho, or ¹⁵³Sm); chromogens, fluorescent labels (for example, FITC, rhodamine, lanthanide phosphors), enzymatic labels (for example, horseradish peroxidase, luciferase, alkaline phosphatase); chemiluminescent markers; biotinyl groups; predetermined polypeptide epitopes recognized by a secondary reporter (for example, leucine zipper pair sequences, binding sites for secondary antibodies, metal binding domains, epitope tags); and magnetic agents, such as gadolinium chelates. Representative examples of labels commonly employed for immunoassays include moieties that produce light, for example, acridinium compounds, and moieties that produce fluorescence, for example, fluorescein. In this regard, the moiety itself may not be detectably labeled but may become detectable upon reaction with yet another moiety.

### II. VHH DOMAINS BINDING B7H3

[0228] Provided herein are B7H3-binding polypeptides that are VHH-containing polypeptides containing at least one VHH domain that specifically binds to B7H3. In some embodiments, the VHH domain binds human B7H3. In some of any of the provided embodiments, the VHH domain binds B7H3 having the sequence set forth in SEQ ID NO:190 or a mature form thereof lacking the signal sequence. In some embodiments, the VHH domain bind or recognizes 4IgB7H3. In some embodiments, the VHH domain binds or recognizes 2IgB7H3. In some embodiments, the VHH domain binds or recognizes 4IgB7H3 and 2IgB7H3. In some embodiments, the VHH-containing polypeptides incorporate multiple copies of a VHH domain provided herein. In such embodiments, the VHH-containing polypeptide may incorporate multiple copies of the same VHH domain. In some embodiments, the VHH-containing polypeptides may incorporate multiple copies of a VHH domain that are different but that recognize the same epitope on B7H3. The VHH-containing polypeptides can be formatted in a variety of formats, including any as described in Section III below.

[0229] A VHH domain is an antibody fragment that is a single monomeric variable antibody domain that is able to bind selectively to a specific antigen. With a molecular weight of only 12-15 kDa, VHH domains (also called single-domain antibodies) are much smaller than common antibodies (150-160 kDa) which are composed of two heavy protein chains and two light chains, and even smaller than Fab fragments (˜50 kDa, one light chain and half a heavy chain) and single-chain variable fragments (˜25 kDa, two variable domains, one from a light and one from a heavy chain).

[0230] Single domain antibodies are antibodies whose complementary determining regions are part of a single domain polypeptide. Examples include, but are not limited to, heavy chain antibodies, antibodies naturally devoid of light chains, single domain antibodies derived from conventional 4-chain antibodies, engineered antibodies and single domain scaffolds other than those derived from antibodies. Single domain antibodies may be derived from any species including, but not limited to mouse, human, camel, llama, alpaca, vicuna, guanaco, shark, goat, rabbit, and/or bovine. In some embodiments, a single domain antibody as used herein is a naturally occurring single domain antibody known as heavy chain antibody devoid of light chains. For clarity reasons, this variable domain derived from a heavy chain antibody naturally devoid of light chain is known herein as a VHH to distinguish it from the conventional VH of four chain immunoglobulins. Such a VHH molecule can be derived from antibodies raised in Camelidae species, for example in camel, llama, dromedary, alpaca, vicuna and guanaco. Other species besides Camelidae may produce heavy chain antibodies naturally devoid of light chain; such VHHs are within the scope of the disclosure.

[0231] Methods for the screening of VHH domains, including VHH-binding polypeptides, that possess the desired specificity for B7H3 include, but are not limited to, enzyme linked immunosorbent assay (ELISA), enzymatic assays, flow cytometry, and other immunologically mediated techniques known within the art.

[0232] Among the provided VHH domains provided herein are B7H3 VHH (llama-derived) and humanized sequences, such as any described below.

[0233] In some embodiments, a VHH domain that binds B7H3 may be humanized. Humanized antibodies (such as VHH-containing polypeptides) are useful as therapeutic molecules because humanized antibodies reduce or eliminate the human immune response to non-human antibodies, which can result in an immune response to an antibody therapeutic, and decreased effectiveness of the therapeutic. Generally, a humanized antibody comprises one or more variable domains in which CDRs, (or portions thereof) are derived from a non-human antibody, and FRs (or portions thereof) are derived from human antibody sequences. A humanized antibody optionally will also comprise at least a portion of a human constant region. In some embodiments, some FR residues in a humanized antibody are substituted with corresponding residues from a non-human antibody (for example, the antibody from which the CDR residues are derived), for example, to restore or improve antibody specificity or affinity.

[0234] Humanized antibodies and methods of making them are reviewed, for example, in Almagro and Fransson, (2008) Front. Biosci. 13: 1619-1633, and are further described, for example, in Riechmann et al., (1988) Nature 332:323-329; Queen et al., (1989) Proc. Natl Acad. Sci. USA 86: 10029-10033; U.S. Pat. Nos. 5,821,337, 7,527,791, 6,982,321, and 7,087,409; Kashmiri et al., (2005) Methods 36:25-34; Padlan, (1991) Mol. Immunol. 28:489-498 (describing “resurfacing”); Dall'Acqua et al., (2005) Methods 36:43-60 (describing “FR shuffling”); and Osbourn et al., (2005) Methods 36:61-68 and Klimka et al., (2000) Br. J. Cancer, 83:252-260 (describing the “guided selection” approach to FR shuffling).

[0235] Human framework regions that can be used for humanization include but are not limited to: framework regions selected using the “best-fit” method (see, for example, Sims et al. (1993) J. Immunol. 151 :2296); framework regions derived from the consensus sequence of human antibodies of a particular subgroup of heavy chain variable regions (see, for example, Carter et al. (1992) Proc. Natl. Acad. Sci. USA, 89:4285; and Presta et al. (1993) J. Immunol, 151:2623); human mature (somatically mutated) framework regions or human germline framework regions (see, for example, Almagro and Fransson, (2008) Front. Biosci. 13:1619-1633); and framework regions derived from screening FR libraries (see, for example, Baca et al., (1997) J. Biol. Chem. 272: 10678-10684 and Rosok et al., (1996) J. Biol. Chem. 271:22611-22618). Typically, the FR regions of a VHH are replaced with human FR regions to make a humanized VHH. In some embodiments, certain FR residues of the human FR are replaced in order to improve one or more properties of the humanized VHH. VHH domains with such replaced residues are still referred to herein as “humanized.”

[0236] Provided herein is a VHH domain that binds B7H3 in which the VHH domain comprises a a CDR1, CDR2 and CDR3 contained in a VHH amino acid sequences selected from any of SEQ ID NO: 1-114 or an amino acid sequence that has at least 90%, 91%, 92%, 93%, 94%, 95%, 96%, 97%, 98%, or 99% sequence identity to the V_{H}H region amino acid selected from any one of SEQ ID NOs: 1-114 In some embodiments, a B7H3 VHH domain provided herein contains a CDR1 set forth in any one of SEQ ID NOS: 115-145, a CDR2 set forth in any one of SEQ ID NOS: 146-167 and a CDR3 set forth in any one of SEQ ID NOS: 168-189. Among the provided B7H3 VHH domain has the amino acid sequence set forth in any of SEQ ID NOS: 1-114or an amino acid sequence that has at least 90%, 91%, 92%, 93%, 94%, 95%, 96%, 97%, 98%, or 99% sequence identity to the V_{H}H region amino acid selected from any one of SEQ ID NOs: 1-114 In some embodimetns, the B7H3 VHH domain has the sequence of amino acids set forth in any one of SEQ ID NOS: 1-114.

[0237] Provided herein is a VHH domain that binds B7H3 in which the VHH domain comprises a a CDR1, CDR2 and CDR3 contained in a VHH amino acid sequences selected from any of SEQ ID NO: 1-114, 466, 467, 489, or 490, 492-518 or an amino acid sequence that has at least 90%, 91%, 92%, 93%, 94%, 95%, 96%, 97%, 98%, or 99% sequence identity to the V_{H}H region amino acid selected from any one of SEQ ID NOs: 1-114, 466, 467, 489, or 490, 492-518 In some embodiments, a B7H3 VHH domain provided herein contains a CDR1 set forth in any one of SEQ ID NOS: 115-145, a CDR2 set forth in any one of SEQ ID NOS: 146-167 and a CDR3 set forth in any one of SEQ ID NOS: 168-189 or 483-488. Among the provided B7H3 VHH domain has the amino acid sequence set forth in any of SEQ ID NOS: 1-114, 466, 467, 489, or 490, 492-518 or an amino acid sequence that has at least 90%, 91%, 92%, 93%, 94%, 95%, 96%, 97%, 98%, or 99% sequence identity to the V_{H}H region amino acid selected from any one of SEQ ID NOs: 1-114, 466, 467, 489, or 490, 492-518. In some embodimetns, the B7H3 VHH domain has the sequence of amino acids set forth in any one of SEQ ID NOS: 1-114, 466, 467, 489, or 490, 492-518.

[0238] In some embodiments, a B7H3 VHH domain provided herein contains a CDR1, CDR2, CDR3 contained in a VHH domain set forth in SEQ ID NO:1, or an amino acid sequence that has at least 90%, 91%, 92%, 93%, 94%, 95%, 96%, 97%, 98%, or 99% sequence identity to the VHH region amino acid selected set forth in SEQ ID NO:1. In some embodiments, the B7H3 VHH domain has the amino acid sequence set forth in SEQ ID NO:1 or an amino acid sequence that has at least 90%, 91%, 92%, 93%, 94%, 95%, 96%, 97%, 98%, or 99% sequence identity to the amino acid selected set forth in SEQ ID NO: 1. In some embodiments, the B7H3 VHH domain is a humanized variant of the amino acid sequence set forth in SEQ ID NO:1.

[0239] In some embodiments, a B7H3 VHH domain provided herein contains a CDR1 set forth in any one of SEQ ID NOS: 115, 116, 117, 118, 119, 120, 121 or 122, a CDR2 set forth in any one of SEQ ID NOS: 146, 147, 148, 149, 150, 151 and a CDR3 set forth in SEQ ID NO: 168.

[0240] In some embodiments, the B7H3 VHH domain provided herein contains a CDR1, CDR2, and CDR3 set forth in any one of SEQ ID NO: 115, 146 and 168, respectively. In some embodiments, the B7H3 VHH domain provided herein contains a CDR1, CDR2 and CDR3 set forth in any one of SEQ ID NO: 116, 146 and 168, respectively. In some embodiments, the B7H3 VHH domain provided herein contains a CDR1, CDR2 and CDR3 set forth in any one of SEQ ID NO: 117, 146 and 168, respectively. In some embodiments, the B7H3 VHH domain provided herein contains a CDR1, CDR2 and CDR3 set forth in any one of SEQ ID NO: 118, 146 and 168, respectively. In some embodiments, the B7H3 VHH domain provided herein contains a CDR1, CDR2 and CDR3 set forth in any one of SEQ ID NO: 119, 146 and 168, respectively. In some embodiments, the B7H3 VHH domain provided herein contains a CDR1, CDR2 and CDR3 set forth in any one of SEQ ID NO: 120, 146 and 168, respectively. In some embodiments, the B7H3 VHH domain provided herein contains a CDR1, CDR2 and CDR3 set forth in any one of SEQ ID NO: 115, 147 and 168, respectively. In some embodiments, the B7H3 VHH domain provided herein contains a CDR1, CDR2 and CDR3 set forth in any one of SEQ ID NO: 115, 148 and 168, respectively. In some embodiments, the B7H3 VHH domain provided herein contains a CDR1, CDR2 and CDR3 set forth in any one of SEQ ID NO: 115, 149 and 168, respectively. In some embodiments, the B7H3 VHH domain provided herein contains a CDR1, CDR2 and CDR3 set forth in any one of SEQ ID NO: 115, 150 and 168, respectively. In some embodiments, the B7H3 VHH domain provided herein contains a CDR1, CDR2 and CDR3 set forth in any one of SEQ ID NO: 115, 151 and 168, respectively. In some embodiments, the B7H3 VHH domain provided herein contains a CDR1, CDR2 and CDR3 set forth in any one of SEQ ID NO: 116, 147 and 168, respectively. In some embodiments, the B7H3 VHH domain provided herein contains a CDR1, CDR2 and CDR3 set forth in any one of SEQ ID NO: 118, 147 and 168, respectively. In some embodiments, the B7H3 VHH domain provided herein contains a CDR1, CDR2 and CDR3 set forth in any one of SEQ ID NO: 119, 147 and 168, respectively. In some embodiments, the B7H3 VHH domain provided herein contains a CDR1, CDR2 and CDR3 set forth in any one of SEQ ID NO: 116, 151 and 168, respectively. In some embodiments, the B7H3 VHH domain provided herein contains a CDR1, CDR2 and CDR3 set forth in any one of SEQ ID NO: 121, 147 and 168, respectively. In some embodiments, the B7H3 VHH domain provided herein contains a CDR1, CDR2 and CDR3 set forth in SEQ ID NOs: 119, 149 and 168, respectively. In some embodiments, the B7H3 VHH domain provided herein contains a CDR1, CDR2 and CDR3 set forth in any one of SEQ ID NO: 122, 151 and 168, respectively.

[0241] In some aspects, a VHH domain that binds B7H3 comprises a CDR1, CDR2 and CDR3 contained in a VHH amino acid sequences selected from any of SEQ ID NO: 2-34, 467,or an amino acid sequence that has at least 90%, 91%, 92%, 93%, 94%, 95%, 96%, 97%, 98%, or 99% sequence identity to the V_{H}H region amino acid selected from any one of SEQ ID NOs: 2-34, 467.

[0242] In some aspects, a VHH domain that binds B7H3 comprises a CDR1, CDR2 and CDR3 contained in a VHH amino acid sequences selected from any of SEQ ID NO: 2-34, 467, 489-490, and 492-497 or an amino acid sequence that has at least 90%, 91%, 92%, 93%, 94%, 95%, 96%, 97%, 98%, or 99% sequence identity to the V_{H}H region amino acid selected from any one of SEQ ID NOs: 2-34, 467, 489-490, and 492-497.

[0243] In some cases, the provided B7H3 VHH domain is a humanized variant that has the amino acid sequence set forth in any of SEQ ID NOS: 2-34, 467, or an amino acid sequence that has at least 90%, 91%, 92%, 93%, 94%, 95%, 96%, 97%, 98%, or 99% sequence identity to the V_{H}H region amino acid selected from any one of SEQ ID NOs: 2-34, 467, . In some embodimetns, the B7H3 humanized VHH domain has the sequence of amino acids set forth in any one of SEQ ID NOS: 2-34, 467.

[0244] In some cases, the provided B7H3 VHH domain is a humanized variant that has the amino acid sequence set forth in any of SEQ ID NOS: 2-34, 467, 489-490, and 492-497 or an amino acid sequence that has at least 90%, 91%, 92%, 93%, 94%, 95%, 96%, 97%, 98%, or 99% sequence identity to the V_{H}H region amino acid selected from any one of SEQ ID NOs: 2-34, 467, 489-490, and 492-497. In some embodimetns, the B7H3 humanized VHH domain has the sequence of amino acids set forth in any one of SEQ ID NOS: 2-34, 467, 489, and 490.

[0245] In some embodiments, a B7H3 VHH domain provided herein contains a CDR1, CDR2, CDR3 contained in a VHH domain set forth in SEQ ID NO:35, or an amino acid sequence that has at least 90%, 91%, 92%, 93%, 94%, 95%, 96%, 97%, 98%, or 99% sequence identity to the VHH region amino acid selected set forth in SEQ ID NO:35. In some embodiments, the B7H3 VHH domain has the amino acid sequence set forth in SEQ ID NO:35 or an amino acid sequence that has at least 90%, 91%, 92%, 93%, 94%, 95%, 96%, 97%, 98%, or 99% sequence identity to the amino acid selected set forth in SEQ ID NO: 35. In some embodiments, the B7H3 VHH domain is a humanized variant of the amino acid sequence set forth in SEQ ID NO:35.

[0246] In some embodiments, a B7H3 VHH domain provided herein contains a CDR1 set forth in SEQ ID NO: 123, a CDR2 set forth in SEQ ID NO: 152 or 153 and a CDR3 set forth in SEQ ID NO: 170 or 171.

[0247] In some embodiments, the B7H3 VHH domain provided herein contains a CDR1, CDR2, and CDR3 set forth in any one of SEQ ID NO: 123, 152 and 170, respectively. In some embodiments, the B7H3 VHH domain provided herein contains a CDR1, CDR2, and CDR3 set forth in any one of SEQ ID NO: 123, 153 and 170, respectively. In some embodiments, the B7H3 VHH domain provided herein contains a CDR1, CDR2, and CDR3 set forth in any one of SEQ ID NO: 123, 153 and 171, respectively.

[0248] In some aspects, a VHH domain that binds B7H3 comprises a a CDR1, CDR2 and CDR3 contained in a VHH amino acid sequences selected from any of SEQ ID NO:36-43or an amino acid sequence that has at least 90%, 91%, 92%, 93%, 94%, 95%, 96%, 97%, 98%, or 99% sequence identity to the V_{H}H region amino acid selected from any one of SEQ ID NOs: 36-43.

[0249] In some aspects, a VHH domain that binds B7H3 comprises a a CDR1, CDR2 and CDR3 contained in a VHH amino acid sequences selected from any of SEQ ID NO:36-43 and 498-503, or an amino acid sequence that has at least 90%, 91%, 92%, 93%, 94%, 95%, 96%, 97%, 98%, or 99% sequence identity to the V_{H}H region amino acid selected from any one of SEQ ID NOs: 36-43 and 498-503.

[0250] In some cases, the provided B7H3 VHH domain is a humanized variant that has the amino acid sequence set forth in any of SEQ ID NOS: 36-43 or an amino acid sequence that has at least 90%, 91%, 92%, 93%, 94%, 95%, 96%, 97%, 98%, or 99% sequence identity to the V_{H}H region amino acid selected from any one of SEQ ID NOs: 36-43. In some embodimetns, the B7H3 humaized VHH domain has the sequence of amino acids set forth in any one of SEQ ID NOS: 36-43.

[0251] In some cases, the provided B7H3 VHH domain is a humanized variant that has the amino acid sequence set forth in any of SEQ ID NOS: 36-43 and 498-503 or an amino acid sequence that has at least 90%, 91%, 92%, 93%, 94%, 95%, 96%, 97%, 98%, or 99% sequence identity to the V_{H}H region amino acid selected from any one of SEQ ID NOs: 36-43 and 498-503. In some embodimetns, the B7H3 humaized VHH domain has the sequence of amino acids set forth in any one of SEQ ID NOS: 36-43 and 498-503.

[0252] In some embodiments, a B7H3 VHH domain provided herein contains a CDR1, CDR2, CDR3 contained in a VHH domain set forth in SEQ ID NO:44, or an amino acid sequence that has at least 90%, 91%, 92%, 93%, 94%, 95%, 96%, 97%, 98%, or 99% sequence identity to the VHH region amino acid selected set forth in SEQ ID NO:44. In some embodiments, the B7H3 VHH domain has the amino acid sequence set forth in SEQ ID NO:44 or an amino acid sequence that has at least 90%, 91%, 92%, 93%, 94%, 95%, 96%, 97%, 98%, or 99% sequence identity to the amino acid selected set forth in SEQ ID NO: 44. In some embodiments, the B7H3 VHH domain is a humanized variant of the amino acid sequence set forth in SEQ ID NO:44.

[0253] In some embodiments, a B7H3 VHH domain provided herein contains a CDR1 set forth in any one of SEQ ID NOs: 124, 125, 126, 127, 128, 129, 130, 131, 132, 133, a CDR2 set forth in SEQ ID NO: 154 and a CDR3 set forth in any one of SEQ ID NOs:.172, 173, 174, 175, 176, 177, 178, 179, 180, 181, 182 or 183.

[0254] In some embodiments, the B7H3 VHH domain provided herein contains a CDR1, CDR2, and CDR3 set forth in any one of SEQ ID NO: 124, 154, 172, respectively. In some embodiments, the B7H3 VHH domain provided herein contains a CDR1, CDR2, and CDR3 set forth in any one of SEQ ID NO: 124, 154, 173, respectively. In some embodiments, the B7H3 VHH domain provided herein contains a CDR1, CDR2, and CDR3 set forth in any one of SEQ ID NO: 124, 154, 174, respectively. In some embodiments, the B7H3 VHH domain provided herein contains a CDR1, CDR2, and CDR3 set forth in any one of SEQ ID NO: 124, 154, 175, respectively. In some embodiments, the B7H3 VHH domain provided herein contains a CDR1, CDR2, and CDR3 set forth in any one of SEQ ID NO: 125, 154, 173, respectively. In some embodiments, the B7H3 VHH domain provided herein contains a CDR1, CDR2, and CDR3 set forth in any one of SEQ ID NO: 126, 154, 173, respectively. In some embodiments, the B7H3 VHH domain provided herein contains a CDR1, CDR2, and CDR3 set forth in any one of SEQ ID NO: 127, 154, 173, respectively. In some embodiments, the B7H3 VHH domain provided herein contains a CDR1, CDR2, and CDR3 set forth in any one of SEQ ID NO: 128, 154, 173, respectively. In some embodiments, the B7H3 VHH domain provided herein contains a CDR1, CDR2, and CDR3 set forth in any one of SEQ ID NO: 129, 154, 173, respectively. In some embodiments, the B7H3 VHH domain provided herein contains a CDR1, CDR2, and CDR3 set forth in any one of SEQ ID NO: 130, 154, 173, respectively. In some embodiments, the B7H3 VHH domain provided herein contains a CDR1, CDR2, and CDR3 set forth in any one of SEQ ID NO: 131, 154, 173, respectively. In some embodiments, the B7H3 VHH domain provided herein contains a CDR1, CDR2, and CDR3 set forth in any one of SEQ ID NO: 124, 154, 176, respectively. In some embodiments, the B7H3 VHH domain provided herein contains a CDR1, CDR2, and CDR3 set forth in any one of SEQ ID NO: 124, 154, 177, respectively. In some embodiments, the B7H3 VHH domain provided herein contains a CDR1, CDR2, and CDR3 set forth in any one of SEQ ID NO: 124, 154, 178, respectively. In some embodiments, the B7H3 VHH domain provided herein contains a CDR1, CDR2, and CDR3 set forth in any one of SEQ ID NO: 124, 154, 179, respectively. In some embodiments, the B7H3 VHH domain provided herein contains a CDR1, CDR2, and CDR3 set forth in any one of SEQ ID NO: 124, 154, 180, respectively. In some embodiments, the B7H3 VHH domain provided herein contains a CDR1, CDR2, and CDR3 set forth in any one of SEQ ID NO: 124, 154, 181, respectively. In some embodiments, the B7H3 VHH domain provided herein contains a CDR1, CDR2, and CDR3 set forth in any one of SEQ ID NO: 124, 154, 182, respectively. In some embodiments, the B7H3 VHH domain provided herein contains a CDR1, CDR2, and CDR3 set forth in any one of SEQ ID NO: 124, 154, 183, respectively. In some embodiments, the B7H3 VHH domain provided herein contains a CDR1, CDR2, and CDR3 set forth in any one of SEQ ID NO: 126, 154, 176, respectively. In some embodiments, the B7H3 VHH domain provided herein contains a CDR1, CDR2, and CDR3 set forth in any one of SEQ ID NO: 126, 154, 179, respectively. In some embodiments, the B7H3 VHH domain provided herein contains a CDR1, CDR2, and CDR3 set forth in any one of SEQ ID NO: 126, 154, 182, respectively. In some embodiments, the B7H3 VHH domain provided herein contains a CDR1, CDR2, and CDR3 set forth in any one of SEQ ID NO: 132, 154, 176, respectively. In some embodiments, the B7H3 VHH domain provided herein contains a CDR1, CDR2, and CDR3 set forth in any one of SEQ ID NO: 133, 154, 173, respectively.

[0255] In some aspects, a VHH domain that binds B7H3 comprises a a CDR1, CDR2 and CDR2 contained in a VHH amino acid sequences selected from any of SEQ ID NO: 45-91, 466, or an amino acid sequence that has at least 90%, 91%, 92%, 93%, 94%, 95%, 96%, 97%, 98%, or 99% sequence identity to the V_{H}H region amino acid selected from any one of SEQ ID NOs: 45-91, 466.

[0256] In some aspects, a VHH domain that binds B7H3 comprises a a CDR1, CDR2 and CDR2 contained in a VHH amino acid sequences selected from any of SEQ ID NO: 45-91, 466, and 504-514, or an amino acid sequence that has at least 90%, 91%, 92%, 93%, 94%, 95%, 96%, 97%, 98%, or 99% sequence identity to the V_{H}H region amino acid selected from any one of SEQ ID NOs: 45-91, 466, and 504-514.

[0257] In some cases, the provided B7H3 VHH domain is a humanized variant that has the amino acid sequence set forth in any of SEQ ID NOS: 45-91, 466, aor an amino acid sequence that has at least 90%, 91%, 92%, 93%, 94%, 95%, 96%, 97%, 98%, or 99% sequence identity to the V_{H}H region amino acid selected from any one of SEQ ID NOs: 45-91, 466. In some embodiments, the B7H3 humanized VHH domain has the sequence of amino acids set forth in any one of SEQ ID NOS: 45-91, 466.

[0258] In some cases, the provided B7H3 VHH domain is a humanized variant that has the amino acid sequence set forth in any of SEQ ID NOS: 45-91, 466, and 504-514or an amino acid sequence that has at least 90%, 91%, 92%, 93%, 94%, 95%, 96%, 97%, 98%, or 99% sequence identity to the V_{H}H region amino acid selected from any one of SEQ ID NOs: 45-91, 466, and 504-514. In some embodiments, the B7H3 humanized VHH domain has the sequence of amino acids set forth in any one of SEQ ID NOS: 45-91, 466, and 504-514.

[0259] In some embodiments, a B7H3 VHH domain provided herein contains a CDR1, CDR2, CDR3 contained in a VHH domain set forth in SEQ ID NO:105, or an amino acid sequence that has at least 90%, 91%, 92%, 93%, 94%, 95%, 96%, 97%, 98%, or 99% sequence identity to the VHH region amino acid selected set forth in SEQ ID NO:105. In some embodiments, the B7H3 VHH domain has the amino acid sequence set forth in SEQ ID NO:105 or an amino acid sequence that has at least 90%, 91%, 92%, 93%, 94%, 95%, 96%, 97%, 98%, or 99% sequence identity to the amino acid selected set forth in SEQ ID NO: 105. In some embodiments, the B7H3 VHH domain is a humanized variant of the amino acid sequence set forth in SEQ ID NO:105.

[0260] In some embodiments, a B7H3 VHH domain provided herein contains a CDR1 set forth in SEQ ID NO: 145, a CDR2 set forth in SEQ ID NO: 167 and a CDR3 set forth in SEQ ID NO:195.

[0261] In some embodiments, a B7H3 VHH domain provided herein contains a CDR1 set forth in SEQ ID NO: 145, a CDR2 set forth in SEQ ID NO: 167 and a CDR3 set forth in SEQ ID NO:488.

[0262] In some aspects, a VHH domain that binds B7H3 comprises a a CDR1, CDR2 and CDR2 contained in a VHH amino acid sequences selected from any of SEQ ID NO:106-109, or an amino acid sequence that has at least 90%, 91%, 92%, 93%, 94%, 95%, 96%, 97%, 98%, or 99% sequence identity to the V_{H}H region amino acid selected from any one of SEQ ID NOs: 106-109.

[0263] In some cases, the provided B7H3 VHH domain is a humanized variant that has the amino acid sequence set forth in any of SEQ ID NOS: 106-109 or an amino acid sequence that has at least 90%, 91%, 92%, 93%, 94%, 95%, 96%, 97%, 98%, or 99% sequence identity to the V_{H}H region amino acid selected from any one of SEQ ID NOs: 106-109. In some embodimetns, the B7H3 humanized VHH domain has the sequence of amino acids set forth in any one of SEQ ID NOS: 106-109.

[0264] In some embodiments, a B7H3 VHH domain provided herein contains a CDR1, CDR2, CDR3 contained in a VHH domain set forth in SEQ ID NO:110, or an amino acid sequence that has at least 90%, 91%, 92%, 93%, 94%, 95%, 96%, 97%, 98%, or 99% sequence identity to the VHH region amino acid selected set forth in SEQ ID NO:110. In some embodiments, the B7H3 VHH domain has the amino acid sequence set forth in SEQ ID NO:110 or an amino acid sequence that has at least 90%, 91%, 92%, 93%, 94%, 95%, 96%, 97%, 98%, or 99% sequence identity to the amino acid selected set forth in SEQ ID NO: 110. In some embodiments, the B7H3 VHH domain is a humanized variant of the amino acid sequence set forth in SEQ ID NO:110.

[0265] In some embodiments, a B7H3 VHH domain provided herein contains a CDR1 set forth in SEQ ID NO: 131, a CDR2 set forth in SEQ ID NO: 169 and a CDR3 set forth in SEQ ID NO:189.

[0266] In some embodiments, a B7H3 VHH domain provided herein contains a CDR1 set forth in SEQ ID NO: 131, a CDR2 set forth in SEQ ID NO: 161 and a CDR3 set forth in SEQ ID NO:189.

[0267] In some aspects, a VHH domain that binds B7H3 comprises a a CDR1, CDR2 and CDR2 contained in a VHH amino acid sequences selected from any of SEQ ID NO:111-114, or an amino acid sequence that has at least 90%, 91%, 92%, 93%, 94%, 95%, 96%, 97%, 98%, or 99% sequence identity to the V_{H}H region amino acid selected from any one of SEQ ID NOs: 111-114.

[0268] In some aspects, a VHH domain that binds B7H3 comprises a a CDR1, CDR2 and CDR2 contained in a VHH amino acid sequences selected from any of SEQ ID NO:111-114 and 515-528, or an amino acid sequence that has at least 90%, 91%, 92%, 93%, 94%, 95%, 96%, 97%, 98%, or 99% sequence identity to the V_{H}H region amino acid selected from any one of SEQ ID NOs: 111-114 and 515-518.

[0269] In some cases, the provided B7H3 VHH domain is a humanized variant that has the amino acid sequence set forth in any of SEQ ID NOS: 111-114 or an amino acid sequence that has at least 90%, 91%, 92%, 93%, 94%, 95%, 96%, 97%, 98%, or 99% sequence identity to the V_{H}H region amino acid selected from any one of SEQ ID NOs: 111-114. In some embodimetns, the B7H3 humanized VHH domain has the sequence of amino acids set forth in any one of SEQ ID NOS: 111-114.

[0270] In some cases, the provided B7H3 VHH domain is a humanized variant that has the amino acid sequence set forth in any of SEQ ID NOS: 111-114 and 515-518 or an amino acid sequence that has at least 90%, 91%, 92%, 93%, 94%, 95%, 96%, 97%, 98%, or 99% sequence identity to the V_{H}H region amino acid selected from any one of SEQ ID NOs: 111-114 and 515-518. In some embodimetns, the B7H3 humanized VHH domain has the sequence of amino acids set forth in any one of SEQ ID NOS: 111-114 and 515-518.

### III. FUSION PROTEINS AND CONJUGATES CONTAINING B7H3-BINDING POLYPEPTIDES

[0271] Provided herein are fusion proteins and conjugates containing B7H3-binding polypeptides containing at least one VHH domain that specifically binds B7H3 linked, directly or indirectly, to one or more additional domains or moieties. In some embodiments, the fusion protein or conjugate of the present disclosure is composed of a single polypeptide. In other embodiments, the fusion protein or conjugate of the present disclosure is composed of more than one polypeptide. In some embodiments, the B7H3-binding polypeptide of the present disclosure incorporates at least one VHH domain that specifically binds B7H3. In some aspects, the B7H3-binding polypeptide is multivalent. In some embodiments, the B7H3-binding polypeptides include two or more copies of a VHH domain that specifically binds B7H3, for example, three or more, four or more, five or more, or six or more copies of a VHH domain that specifically binds B7H3. In certain aspects, the B7H3-binding polypeptide is multispecific. For example, in some cases, the one or more additional domain may be one or more additional binding domain that binds to one or more further antigen or protein.

[0272] In some embodiments, the B7H3-binding polypeptides of the present disclosure include two or more polypeptide sequences that are operably linked via amino acid linkers. In some embodiments, these linkers are composed predominately of the amino acids Glycine and Serine, denoted as GS-linkers herein. The GS-linkers of the fusion proteins of the present disclosure can be of various lengths, for example, 5, 6, 7, 8, 9, 10, 11, 12, 13, 14, 15, 16, 17, 18, 19, 20 amino acids in length. In some embodiments, the GS-linker comprises an amino acid sequence selected from the group consisting of GGSGGS, i.e., (GGS)₂ (SEQ ID NO:191); GGSGGSGGS, i.e., (GGS)₃ (SEQ ID NO:192); GGSGGSGGSGGS, i.e., (GGS)₄ (SEQ ID NO:193); and GGSGGSGGSGGSGGS, i.e., (GGS)₅ (SEQ ID NO:194). In some embodiments, the linker is a flexible linker comprising Glycine residues, such as, by way of non-limiting example, GG, GGG, GGGG (SEQ ID NO:195), GGGGG (SEQ ID NO:196), and GGGGGG (SEQ ID NO: 197). In some embodiments, the linker is (GGGGS)n, wherein n is 1 to 5 (SEQ ID NO:313); (GGGGGS)n, wherein n is 1 to 4 (SEQ ID NO:314); GGGGS (SEQ ID NO:315); GGGGGS (SEQ ID NO:316); GGGGGSGGGGGSGGGGGS (SEQ ID NO:317); GGGGSGGGGSGGGGS (SEQ ID NO:318); or GGSGGGGSGGGGSGGGGS (SEQ ID NO:319). In some embodiments, the B7H3-binding polypeptide includes a combination of a GS-linker and a Glycine linker

### A. Fc Fusions

[0273] Provided herein is a B7H3-binding polypeptide that is a fusion protein containing at least one VHH domain that binds B7H3 provided herein and an Fc domain. In some embodiments, a B7H3-binding polypeptide provided herein comprises one, two, three, or four VHH domains that bind B7H3 and an Fc domain.

[0274] In some embodiments, incorporation of an immunoglobulin Fc region into the fusion protein can, in some aspects, be composed of two polypeptides that together form a dimer. In some embodiments, an Fc domain mediates dimerization of the B7H3-binding polypeptide at physiological conditions, such as when expressed from a cell, such that a dimer is formed that doubles the number of B7H3 binding sites. For example, a B7H3-binding polypeptide comprising three VHH domains that bind B7H3 and an Fc region is trivalent as a monomer, but the Fc region may mediate dimerization, such that the B7H3-binding polypeptide exists as a hexavalent dimer under such conditions. In some embodiments, a B7H3 VHH domain is fused to an IgG Fc region and in these embodiments, the fusion protein is bivalent having two B7H3 VHH domains per molecule. In some embodiments, two B7H3 binding domains (2×) are fused to an IgG Fc region and in these embodiments, the fusion protein is tetravalent having four B7H3 VHH domains per molecule. In some embodiments, three B7H3 VHH domain (3×) are fused to an IgG Fc region and in these embodiments, the fusion protein is hexavalent having six B7H3 VHH domains per molecule.

[0275] In some embodiments, the multivalent B7H3-binding polypeptide is bivalent. In some embodiments, the bivalent B7H3-binding polypeptide of the disclosure includes two copies of a B7H3-binding polypetide having the following structure: (B7H3 VHH)-Linker-Fc. In some embodiments, the multivalent B7H3-binding polypeptide is tetravalent. In some embodiments, the tetravalent B7H3-binding polypeptide of the disclosure includes two copies of a B7H3-polypeptide having the following structure: (B7H3 VHH)-Linker-(B7H3 VHH)-Linker-Fc. In some embodiments, the multivalent B7H3-binding polypeptide is hexavalent. In some embodiments, the hexavalent B7H3-binding polypeptide of the disclosure includes two copies of a B7H3-binding polypeptide having the following structure: (B7H3 VHH)-Linker-(B7H3 VHH)-Linker-(B7H3 VHH)-Linker-Fc.

[0276] In some cases, the CH3 domain of the Fc region can be used as homodimerization domain, such that the resulting fusion protein is formed from two identical polypeptides. In other cases, the CH3 dimer interface region of the Fc region can be mutated so as to enable heterodimerization. For example, a heterodimerization domain can be incorporated into the fusion protein such that the construct is an asymmetric fusion protein.

[0277] In any of the provided embodiments, a B7H3 VHH domain can be any as described above. In come embodiments, the B7H3 VHH domain is a humanized VHH domain that binds B7H3.

[0278] In various embodiments, an Fc domain included in a B7H3-bindng polypeptide is a human Fc domain, or is derived from a human Fc domain. In some embodiments, the fusion protein contains an immunoglobulin Fc region. In some embodiments, the immunoglobulin Fc region is an IgG isotype selected from the group consisting of IgG1 isotype, IgG2 isotype, IgG3 isotype, and IgG4 subclass.

[0279] In some embodiments, the immunoglobulin Fc region or immunologically active fragment thereof is an IgG isotype. For example, the immunoglobulin Fc region of the fusion protein is of human IgG1 isotype, having an amino acid sequence:

(SEQ ID NO: 198)
PAPELLGGPS VFLFPPKPKD TLMISRTPEV
TCVVVDVSHE DPEVKFNWYV DGVEVHNAKT
KPREEQYNST YRVVSVLTVL HQDWLNGKEY
KCKVSNKALP APIEKTISKA KGQPREPQVY
TLPPSRDELT KNQVSLTCLV KGFYPSDIAV
EWESNGQPEN NYKTTPPVLD SDGSFFLYSK
LTVDKSRWQQ GNVFSCSVMH EALHNHYTQK
SLSLSPGK

[0280] In some embodiments, the immunoglobulin Fc region or immunologically active fragment thereof comprises a human IgG1 polypeptide sequence that is at least 50%, 60%, 65%, 70%, 75%, 80%, 85%, 90%, 91%, 92%, 93%, 94%, 95%, 96%, 97%, 98%, or 99% identical to the amino acid sequence of SEQ ID NO: 198.

[0281] In some embodiments where the fusion protein of the disclosure includes an Fc polypeptide, the Fc polypeptide is mutated or modified. In some cases, the mutations include one or more amino acid substitutions to reduce an effector function of the Fc polypeptide. Various examples of mutations to Fc polypeptides to alter, such as reduce, effector function are known, including any as described below. In some embodiments, reference to amino acid substitutions in an Fc region is by EU numbering by Kabat (also called Kabat numbering) unless described with reference to a specific SEQ ID NO. EU numbering is known and is according to the most recently updated IMGT Scientific Chart (IMGT®, the international ImMunoGeneTics information system®, http://www.imgt.org/IMGTScientificChart/Numbering/Hu_IGHGnber.html (created: 17 May 2001, last updated: 10 Jan. 2013) and the EU index as reported in Kabat, E. A. et al. Sequences of Proteins of Immunological interest. 5th ed. US Department of Health and Human Services, NIH publication No. 91-3242 (1991).

[0282] In some embodiments, an Fc region that exhibits reduced effector functions may be a desirable candidate for applications in which B7H3 or CD3 binding is desired yet certain effector functions (such as CDC and ADCC) are unnecessary or deleterious. In vitro and/or in vivo cytotoxicity assays can be conducted to confirm the reduction/depletion of CDC and/or ADCC activities. For example, Fc receptor (FcR) binding assays can be conducted to ensure that the multispecific polypeptide constructs and/or cleaved components thereof lack FcγR binding (hence likely lacking ADCC activity), but retains FcRn binding ability. The primary cells for mediating ADCC, NK cells, express FcγRIII only, whereas monocytes express FcγRI, FcγRII and FcγRIII. Non-limiting examples of in vitro assays to assess ADCC activity of a molecule of interest is described in U.S. Pat. No. 5,500,362 (see, e.g., Hellstrom, I. et al. Proc. Nat'l Acad. Sci. USA 83:7059-7063 (1986)) and Hellstrom, I et al., Proc. Nat'l Acad. Sci. USA 82:1499-1502 (1985); U.S. Pat. No. 5,821,337 (see Bruggemann, M. et al., J. Exp. Med. 166:1351-1361 (1987)). Alternatively, non-radioactive assay methods may be employed (see, for example, ACTI™ non-radioactive cytotoxicity assay for flow cytometry (CellTechnology, Inc. Mountain View, Calif.; and CytoTox 96™ non-radioactive cytotoxicity assay (Promega, Madison, Wis.). Useful effector cells for such assays include peripheral blood mononuclear cells (PBMC) and Natural Killer (NK) cells. Alternatively, or additionally, ADCC activity of the molecule of interest may be assessed in vivo, e.g., in an animal model such as that disclosed in Clynes et al. Proc. Nat'l Acad. Sci. USA 95:652-656 (1998). C1q binding assays may also be carried out to confirm that the multispecific polypeptide construct or cleaved components thereof is unable to bind C1q and hence lacks CDC activity. See, e.g., C1q and C3c binding ELISA in WO 2006/029879 and WO 2005/100402. To assess complement activation, a CDC assay may be performed (see, for example, Gazzano-Santoro et al., J. Immunol. Methods 202:163 (1996); Cragg, M. S. et al., Blood 101:1045-1052 (2003); and Cragg, M. S. and M. J. Glennie, Blood 103:2738-2743 (2004)). FcRn binding and in vivo clearance/half-life determinations can also be performed using methods known in the art (see, e.g., Petkova, S. B. et al., Int'l. Immunol. 18(12):1759-1769 (2006)).

[0283] In some embodiments, the human IgG Fc region is modified to alter antibody-dependent cellular cytotoxicity (ADCC) and/or complement-dependent cytotoxicity (CDC), e.g., the amino acid modifications described in Natsume et al., 2008 Cancer Res, 68(10): 3863-72; Idusogie et al., 2001 J Immunol, 166(4): 2571-5; Moore et al., 2010 mAbs, 2(2): 181-189; Lazar et al., 2006 PNAS, 103(11): 4005-4010, Shields et al., 2001 JBC, 276(9): 6591-6604; Stavenhagen et al., 2007 Cancer Res, 67(18): 8882-8890; Stavenhagen et al., 2008 Advan. Enzyme Regul., 48: 152-164; Alegre et al, 1992 J Immunol, 148: 3461-3468; Reviewed in Kaneko and Niwa, 2011 Biodrugs, 25(1):1-11.

[0284] Examples of mutations that enhance ADCC include modification at Ser239 and Ile332, for example Ser239Asp and Ile332Glu (S239D, 1332E). Examples of mutations that enhance CDC include modifications at Lys326 and Glu333. In some embodiments, the Fc region is modified at one or both of these positions, for example Lys326Ala and/or Glu333Ala (K326A and E333A) using the Kabat numbering system.

[0285] In some embodiments, the Fc region of the fusion protein is altered at one or more of the following positions to reduce Fc receptor binding: Leu 234 (L234), Leu235 (L235), Asp265 (D265), Asp270 (D270), Ser298 (S298), Asn297 (N297), Asn325 (N325), Ala327 (A327) or Pro329 (P329). For example, Leu 234Ala (L234A), Leu235Ala (L235A), Leu235Glu (L235E), Asp265Asn (D265N), Asp265Ala (D265A), Asp270Asn (D270N), Ser298Asn (S298N), Asn297Ala (N297A), Pro329Ala (P329A) or Pro239Gly (P329G), Asn325Glu (N325E) orAla327Ser (A327S). In preferred embodiments, modifications within the Fc region reduce binding to Fc-receptor-gamma receptors while have minimal impact on binding to the neonatal Fc receptor (FcRn).

[0286] In some embodiments, the human IgG1 Fc region is modified at amino acid Asn297 (Kabat Numbering) to prevent glycosylation of the fusion protein, e.g., Asn297Ala (N297A) or Asn297Asp (N297D). In some embodiments, the Fc region of the fusion protein is modified at amino acid Leu235 (Kabat Numbering) to alter Fc receptor interactions, e.g., Leu235Glu (L235E) or Leu235Ala (L235A). In some embodiments, the Fc region of the fusion protein is modified at amino acid Leu234 (Kabat Numbering) to alter Fc receptor interactions, e.g., Leu234Ala (L234A). In some embodiments, the Fc region of the fusion protein is modified at amino acid Leu234 (Kabat Numbering) to alter Fc receptor interactions, e.g., Leu235Glu (L235E). In some embodiments, the Fc region of the fusion protein is altered at both amino acids 234 and 235, e.g., Leu234Ala and Leu235Ala (L234A/L235A) or Leu234Val and Leu235Ala (L234V/L235A). In some embodiments, the Fc region of the fusion protein is altered at amino acids at 234, 235, and 297, e.g., Leu234Ala, Leu235Ala, Asn297Ala (L234A/L235A/N297A). In some embodiments, the Fc region of the fusion protein is altered at amino acids at 234, 235, and 329, e.g., Leu234Ala, Leu235Ala, Pro239Ala (L234A/L235A/P329A). In some embodiments, the Fc region of the fusion protein is modified at amino acid Asp265 (Kabat Numbering) to alter Fc receptor interactions, e.g Asp265Ala (D265A). In some embodiments, the Fc region of the fusion protein is modified at amino acid Pro329 (Kabat Numbering) to alter Fc receptor interactions, e.g Pro329Ala (P329A) or Pro329Gly (P329G). In some embodiments, the Fc region of the fusion protein is altered at both amino acids 265 and 329, e.g., Asp265Ala and Pro329Ala (D265A/P329A) or Asp265Ala and Pro329Gly (D265A/P329G). In some embodiments, the Fc region of the fusion protein is altered at amino acids at 234, 235, and 265, e.g., Leu234Ala, Leu235Ala, Asp265Ala (L234A/L235A/D265A). In some embodiments, the Fc region of the fusion protein is altered at amino acids at 234, 235, and 329, e.g., Leu234Ala, Leu235Ala, Pro329Gly (L234A/L235A/P329G). In some embodiments, the Fc region of the fusion protein is altered at amino acids at 234, 235, 265 and 329, e.g., Leu234Ala, Leu235Ala, Asp265Ala, Pro329Gly (L234A/L235A/D265A/P329G). In some embodiments, the Fc region of the fusion protein is altered at Gly235 to reduce Fc receptor binding. For example, wherein Gly235 is deleted from the fusion protein. In some embodiments, the human IgG1 Fc region is modified at amino acid Gly236 to enhance the interaction with CD32A, e.g., Gly236Ala (G236A). In some embodiments, the human IgG1 Fc region lacks Lys447 (EU index of Kabat et al 1991 Sequences of Proteins of Immunological Interest).

[0287] In some embodiments, the Fc region of the fusion protein is lacking an amino acid at one or more of the following positions to reduce Fc receptor binding: Glu233 (E233), Leu234 (L234), or Leu235 (L235). For example, an Fc region included in a B7H3-bindng polypeptide is derived from a human Fc domain, and comprises a three amino acid deletion in the lower hinge corresponding to IgG1 E233, L234, and L235. In some aspects, such Fc polypeptides do not engage FcγRs and thus are referred to as “effector silent” or “effector null.” For example, Fc deletion of these three amino acids reduces the complement protein C1q binding. In some embodiments, a polypeptide with an Fc region with Fc deletion of these three amino acids retains binding to FcRn and therefore has extended half-life and transcytosis associated with FcRn mediated recycling. Such a modified Fc region is referred to as “Fc xELL” or “Fc deletion” and has the following amino acid sequence:

(SEQ ID NO: 199)
PAPGGPSVFL FPPKPKDTLM ISRTPEVTCV
VVDVSHEDPE VKFNWYVDGV EVHNAKTKPR
EEQYNSTYRV VSVLTVLHQD WLNGKEYKCK
VSNKALPAPI EKTISKAKGQ PREPQVYTLP
PSRDELTKNQ VSLTCLVKGF YPSDIAVEWE
SNGQPENNYK TTPPVLDSDG SFFLYSKLTV
DKSRWQQGNV FSCSVMHEAL HNHYTQKSLS
LSPGK

[0288] In some embodiments, the immunoglobulin Fc region or immunologically active fragment thereof comprises a human IgG1 polypeptide sequence that is at least 50%, 60%, 65%, 70%, 75%, 80%, 85%, 90%, 91%, 92%, 93%, 94%, 95%, 96%, 97%, 98%, or 99% identical to the amino acid sequence of SEQ ID NO: 199.

[0289] In some embodiments, the human IgG Fc region is modified to enhance FcRn binding. Examples of Fc mutations that enhance binding to FcRn are Met252Tyr, Ser254Thr, Thr256Glu (M252Y, S254T, T256E, respectively) (Kabat numbering, Dall'Acqua et al 2006, J. Biol Chem Vol. 281(33) 23514-23524), Met428Leu and Asn434Ser (M428L, N434S) (Zalevsky et al 2010 Nature Biotech, Vol. 28(2) 157-159), or Met252Ile, Thr256Asp, Met428Leu (M252I, T256D, M428L, respectively), (EU index of Kabat et al 1991 Sequences of Proteins of Immunological Interest).

[0290] In some embodiments, the Fc domain included in a B7H3-bindng polypeptide is derived from a human Fc domain and comprises mutations M252Y and M428V, herein referred to as “Fc-YV”. In some embodiments, the mutated or modified Fc polypeptide includes the following mutations: M252Y and M428L using the Kabat numbering system. In some embodiments, such mutations enhance binding to FcRn at the acidic pH of the endosome (near 6.5), while losing detectable binding at neutral pH (about 7.2), allowing for enhanced FcRn mediated recycling and extended half-life.

[0291] In some embodiments, the Fc domain included in a B7H3-binding polypeptide is derived from a human Fc domain and comprises mutations to induce heterodimerization. In some embodiments, such mutations include those referred to as “knob” and “hole” mutations. For example, having an amino acid modification within the CH3 domain at Thr366, which when replaced with a more bulky amino acid, e.g., Try (T366W), is able to preferentially pair with a second CH3 domain having amino acid modifications to less bulky amino acids at positions Thr366, Leu368, and Tyr407, e.g., Ser, Ala and Val, respectively (T366S/L368A/Y407V). In some embodiments, the “knob” Fc domain comprises the mutation T366W. In some embodiments, the “hole” Fc domain comprises mutations T366S, L368A, and Y407V. Heterodimerization via CH3 modifications can be further stabilized by the introduction of a disulfide bond, for example by changing Ser354 to Cys (S354C) and Y349 to Cys (Y349C) on opposite CH3 domains (Reviewed in Carter, 2001 Journal of Immunological Methods, 248: 7-15). In some embodiments, Fc domains used for heterodimerization comprise additional mutations, such as the mutation S354C on a first member of a heterodimeric Fc pair that forms an asymmetric disulfide with a corresponding mutation Y349C on the second member of a heterodimeric Fc pair. In some embodiments, one member of a heterodimeric Fc pair comprises the modification H435R or H435K to prevent protein A binding while maintaining FcRn binding. In some embodiments, one member of a heterodimeric Fc pair comprises the modification H435R or H435K, while the second member of the heterodimeric Fc pair is not modified at H435. In various embodiments, the hole Fc domain comprises the modification H435R or H435K (referred to as “hole-R” in some instances when the modification is H435R), while the knob Fc domain does not. In some instances, the hole-R mutation improves purification of the heterodimer over homodimeric hole Fc domains that may be present.

[0292] In some embodiments, the human IgG Fc region is modified to prevent dimerization. In these embodiments, the fusion proteins of the present disclosure are monomeric. For example modification at residue Thr366 to a charged residue, e.g. Thr366Lys, Thr366Arg, Thr366Asp, or Thr366Glu (T366K, T366R, T366D, or T366E, respectively), prevents CH3-CH3 dimerization.

[0293] In some embodiments, the immunoglobulin Fc region or immunologically active fragment of the fusion protein is of human IgG2 isotype, having an amino acid sequence:

(SEQ ID NO: 200)
PAPPVAGPSV FLFPPKPKDT LMISRTPEVT
CVVVDVSHED PEVQFNWYVD GVEVHNAKTK
PREEQFNSTF RVVSVLTVVH QDWLNGKEYK
CKVSNKGLPA PIEKTISKTK GQPREPQVYT
LPPSREEMTK NQVSLTCLVK GFYPSDISVE
WESNGQPENN YKTTPPMLDS DGSFFLYSKL
TVDKSRWQQG NVFSCSVMHE ALHNHYTQKS
LSLSPGK

[0294] In some embodiments, the fusion or immunologically active fragment thereof comprises a human IgG2 polypeptide sequence that is at least 50%, 60%, 65%, 70%, 75%, 80%, 85%, 90%, 91%, 92%, 93%, 94%, 95%, 96%, 97%, 98%, or 99% identical to the amino acid sequence of SEQ ID NO: 200.

[0295] In some embodiments, the human IgG2 Fc region is modified at amino acid Asn297 (e.g. to prevent to glycosylation of the antibody, e.g., Asn297Ala (N297A) or Asn297Asp (N297D). In some embodiments, the human IgG2 Fc region is lacks Lys447 (EU index of Kabat et al 1991 Sequences of Proteins of Immunological Interest).

[0296] In some embodiments, the immunoglobulin Fc region or immunologically active fragment of the fusion protein is of human IgG3 isotype, having an amino acid sequence:

(SEQ ID NO: 201)
PAPELLGGPS VFLFPPKPKD TLMISRTPEV
TCVVVDVSHE DPEVQFKWYV DGVEVHNAKT
KPREEQYNST FRVVSVLTVL HQDWLNGKEY
KCKVSNKALP APIEKTISKT KGQPREPQVY
TLPPSREEMT KNQVSLTCLV KGFYPSDIAV
EWESSGQPEN NYNTTPPMLD SDGSFFLYSK
LTVDKSRWQQ GNIFSCSVMH EALHNRFTQK
SLSLSPGK

[0297] In some embodiments, the antibody or immunologically active fragment thereof comprises a human IgG3 polypeptide sequence that is at least 50%, 60%, 65%, 70%, 75%, 80%, 85%, 90%, 91%, 92%, 93%, 94%, 95%, 96%, 97%, 98%, or 99% identical to the amino acid sequence of SEQ ID NO: 201.

[0298] In some embodiments, the human IgG3 Fc region is modified at amino acid Asn297 (Kabat Numbering) to prevent to glycosylation of the antibody, e.g., Asn297Ala (N297A) or Asn297Asp (N297D). In some embodiments, the human IgG3 Fc region is modified at amino acid 435 to extend the half-life, e.g., Arg435His (R435H). In some embodiments, the human IgG3 Fc region is lacks Lys447 (EU index of Kabat et al 1991 Sequences of Proteins of Immunological Interest).

[0299] In some embodiments, the immunoglobulin Fc region or immunologically active fragment of the fusion protein is of human IgG4 isotype, having an amino acid sequence:

(SEQ ID NO: 202)
PAPEFLGGPS VFLFPPKPKD TLMISRTPEV
TCVVVDVSQE DPEVQFNWYV DGVEVHNAKT
KPREEQFNST YRVVSVLTVL HQDWLNGKEY
KCKVSNKGLP SSIEKTISKA KGQPREPQVY
TLPPSQEEMT KNQVSLTCLV KGFYPSDIAV
EWESNGQPEN NYKTTPPVLD SDGSFFLYSR
LTVDKSRWQE GNVFSCSVMH EALHNHYTQK
SLSLSLGK

[0300] In some embodiments, the antibody or immunologically active fragment thereof comprises a human IgG4 polypeptide sequence that is at least 50%, 60%, 65%, 70%, 75%, 80%, 85%, 90%, 91%, 92%, 93%, 94%, 95%, 96%, 97%, 98%, or 99% identical to the amino acid sequence of SEQ ID NO: 202.

[0301] In some embodiments, the immunoglobulin Fc region or immunologically active fragment of the fusion protein is of human IgG4 isotype, having an amino acid sequence:

(SEQ ID NO: 203)
PAPELLGGPS VFLFPPKPKD TLMISRTPEV
TCVVVDVSQE DPEVQFNWYV DGVEVHNAKT
KPREEQFNST YRVVSVLTVL HQDWLNGKEY
KCKVSNKGLP SSIEKTISKA KGQPREPQVY
TLPPSQEEMT KNQVSLTCLV KGFYPSDIAV
EWESNGQPEN NYKTTPPVLD SDGSFFLYSR
LTVDKSRWQE GNVFSCSVMH EALHNHYTQK
SLSLSLGK

[0302] In some embodiments, the antibody or immunologically active fragment thereof comprises a human IgG4 polypeptide sequence that is at least 50%, 60%, 65%, 70%, 75%, 80%, 85%, 90%, 91%, 92%, 93%, 94%, 95%, 96%, 97%, 98%, or 99% identical to the amino acid sequence of SEQ ID NO: 203.

[0303] In some embodiments, the human IgG4 Fc region is modified at amino acid 235 to alter Fc receptor interactions, e.g., Leu235Glu (L235E). In some embodiments, the human IgG4 Fc region is modified at amino acid Asn297 (Kabat Numbering) to prevent to glycosylation of the antibody, e.g., Asn297Ala (N297A) or Asn297Asp (N297D). In some embodiments, the human IgG4 Fc region is lacks Lys447 (EU index of Kabat et al 1991 Sequences of Proteins of Immunological Interest).

[0304] In some embodiments, the fusion protein contains a polypeptide derived from an immunoglobulin hinge region. The hinge region can be selected from any of the human IgG subclasses. For example, the fusion protein may contain a modified IgG1 hinge having the sequence of EPKSSDKTHTCPPC (SEQ ID NO: 204), where in the Cys220 that forms a disulfide with the C-terminal cysteine of the light chain is mutated to serine, e.g., Cys220Ser (C220S). In other embodiments, the fusion protein contains a truncated hinge having a sequence DKTHTCPPC (SEQ ID NO: 205).

[0305] In some embodiments, the fusion protein has a modified hinge from IgG4, which is modified to prevent or reduce strand exchange, e.g., Ser228Pro (S228P), having the sequence ESKYGPPCPPC (SEQ ID NO: 206). In some embodiments, the fusion protein contains linker polypeptides. In other embodiments, the fusion protein contains linker and hinge polypeptides.

[0306] In some embodiments, the Fc region lacks or has reduced Fucose attached to the N-linked glycan-chain at N297. There are numerous ways to prevent fucosylation, including but not limited to production in a FUT8 deficient cell line; addition inhibitors to the mammalian cell culture media, for example Castanospermine; and metabolic engineering of the production cell line.

[0307] In some embodiments, the Fc region is engineered to eliminate recognition by pre-existing antibodies found in humans. In some embodiments, VHH-containing polypeptides of the present disclosure are modified by mutation of position Leu11, for example Leu11Glu (L11E) or Leu11Lys (L11K). In other embodiments, single domain antibodies of the present disclosure are modified by changes in carboxy-terminal region, for example the terminal sequence has the sequence GQGTLVTVKPGG (SEQ ID NO: 207) or GQGTLVTVEPGG (SEQ ID NO: 208) or modification thereof. In some embodiments, single domain antibodies of the present disclosure are modified by changes in carboxy-terminal region, for example the terminal sequence has the sequence “GG” or modification thereof. In some embodiments, the VHH-containing polypeptides of the present disclosure are modified by mutation of position 11 and by changes in carboxy-terminal region.

[0308] In some embodiments, the one or more polypeptides of the fusion proteins of the present disclosure are operably linked via amino acid linkers. In some embodiments, these linkers are composed predominately of the amino acids Glycine and Serine, denoted as GS-linkers herein. The GS-linkers of the fusion proteins of the present disclosure can be of various lengths, for example, 5, 6, 7, 8, 9, 10, 11, 12, 13, 14, 15, 16, 17, 18, 19, 20 amino acids in length.

[0309] In some embodiments, the GS-linker comprises an amino acid sequence selected from the group consisting of GGSGGS, i.e., (GGS)₂ (SEQ ID NO: 191); GGSGGSGGS, i.e., (GGS)₃ (SEQ ID NO: 192); GGSGGSGGSGGS, i.e., (GGS)₄ (SEQ ID NO: 193); and GGSGGSGGSGGSGGS, i.e., (GGS)₅ (SEQ ID NO: 194). In some embodiments, the linker is a flexible linker comprising Glycine residues, such as, by way of non-limiting example, GG, GGG, GGGG (SEQ ID NO: 195), GGGGG (SEQ ID NO: 196), and GGGGGG (SEQ ID NO: 197). In some embodiments, the fusion proteins can include a combination of a GS-linker and a Glycine linker

### B. Conjugates

[0310] Provided herein are conjugates containing at least one VHH domain that specifically binds B7H3 provided herein and one or more further moiety. The further moiety can be a therapeutic agent, such as a cytotoxic agent, or can be a detection agent. In some embodiments, the moiety can be a targeting moiety, a small molecule drug (non-polypeptide drug of less than 500 Daltons molar mass), a toxin, a cytostatic agent, a cytotoxic agent, an immunosuppressive agent, a radioactive agent suitable for diagnostic purposes, a radioactive metal ion for therapeutic purposes, a prodrug-activating enzyme, an agent that increases biological half-life, or a diagnostic or detectable agent.

[0311] In some embodiments, the conjugate is an antibody drug conjugate (ADC, also called immunoconjugates) containing one or more B7H3 VHH domain provided herein conjugated to a therapeutic agent, which is either cytotoxic, cytostatic or otherwise provides some therapeutic benefit. In some embodiments, the cytotoxic agent is a chemotherapeutic agent, a drug, a growth inhibitory agent, a toxin (e.g., an enzymatically active toxin of bacterial, fungal, plant, or animal origin, or fragments thereof), or a radioactive isotope (i.e., a radioconjugate). In some embodiments, provided antibody drug conjugates of the present disclosure allow targeted-delivery of the drug moiety to tumors. In some cases, this can result in targeted killing of the tumor cell.

[0312] In some embodiments, there is provided a B7H3-binding conjugate comprising at least one B7H3 VHH domain provided herein conjugated with a therapeutic agent. In some embodiments, the therapeutic agent includes, for example, daunomycin, doxorubicin, methotrexate, and vindesine (Rowland et al., Cancer Immunol. Immunother. 21:183-187, 1986). In some embodiments, the therapeutic agent has an intracellular activity. In some embodiments, the B7H3-binding conjugate is internalized and the therapeutic agent is a cytotoxin that blocks the protein synthesis of the cell, therein leading to cell death. In some embodiments, the therapeutic agent is a cytotoxin comprising a polypeptide having ribosome-inactivating activity including, for example, gelonin, bouganin, saporin, ricin, ricin A chain, bryodin, diphtheria toxin, restrictocin, Pseudomonas exotoxin A and variants thereof. In some embodiments, where the therapeutic agent is a cytotoxin comprising a polypeptide having a ribosome-inactivating activity, the B7H3-binding conjugate must be internalized upon binding to the target cell in order for the protein to be cytotoxic to the cells.

[0313] In some embodiments, there is provided a B7H3-binding conjugate comprising at least one B7H3 VHH domain provided herein conjugated with a toxin. In some embodiments, the toxin includes, for example, bacterial toxins such as diphtheria toxin, plant toxins such as ricin, small molecule toxins such as geldanamycin (Mandler et al., J. Nat. Cancer Inst. 92(19):1573-1581 (2000); Mandler et al., Bioorganic & Med. Chem. Letters 10:1025-1028 (2000); Mandler et al., Bioconjugate Chem. 13:786-791 (2002)), maytansinoids (EP 1391213; Liu et al., Proc. Natl. Acad. Sci. USA 93:8618-8623 (1996)), and calicheamicin (Lode et al., Cancer Res. 58:2928 (1998); Hinman et al., Cancer Res. 53:3336-3342 (1993)). The toxins may exert their cytotoxic and cytostatic effects by mechanisms including tubulin binding, DNA binding, or topoisomerase inhibition.

[0314] In some embodiments, there is provided a B7H3-binding conjugate comprising at least one B7H3 VHH domain provided herein conjugated with a label, which can generate a detectable signal, indirectly or directly. These IgSF conjugates can be used for research or diagnostic applications, such as for the in vivo detection of cancer. The label is preferably capable of producing, either directly or indirectly, a detectable signal. For example, the label may be radio-opaque or a radioisotope, such as 3H, 14C, 32P, 35S, 123I, 125I, 131I; a fluorescent (fluorophore) or chemiluminescent (chromophore) compound, such as fluorescein isothiocyanate, rhodamine or luciferin; an enzyme, such as alkaline phosphatase, β-galactosidase or horseradish peroxidase; an imaging agent; or a metal ion. In some embodiments, the label is a radioactive atom for scintigraphic studies, for example 99Tc or 123I, or a spin label for nuclear magnetic resonance (NMR) imaging (also known as magnetic resonance imaging, MRI), such as zirconium-89, iodine-123, iodine-131, indium-111, fluorine-19, carbon-13, nitrogen-15, oxygen-17, gadolinium, manganese or iron. Zirconium-89 may be complexed to various metal chelating agents and conjugated to antibodies, e.g., for PET imaging (WO 2011/056983).

[0315] The B7H3-binding conjugates may be prepared using any methods known in the art. See, e.g., WO 2009/067800, WO 2011/133886, and U.S. Patent Application Publication No. 2014322129, incorporated by reference herein in their entirety.

[0316] In some embodiments, the attachment can be covalent or non-covalent, e.g., via a biotin-streptavidin non-covalent interaction. In some embodiments, 1, 2, 3, 4, 5 or more moieties, which can be the same or different, are conjugated, linked or fused to a B7H3 VHH domain to form a B7H3-binding conjugate. In some embodiments, such moieties can be attached to the VHH domain using various molecular biological or chemical conjugation and linkage methods known in the art and described below. In some embodiments, linkers such as peptide linkers, cleavable linkers, non-cleavable linkers or linkers that aid in the conjugation reaction, can be used to link or conjugate the effector moieties to the variant polypeptide or immunomodulatory protein.

[0317] In some embodiments, a B7H3 VHH domain is conjugated to one or more moieties, e.g. about 1 to about 20 drug moieties per VHH, through a linker (L). In some embodiments, the B7H3-binding conjugate comprises the following components: (VHH domain), (L)_{q} and (moiety)ₘ, wherein the VHH domain is any of the described VHH domains capable of specifically binding B7H3 as described; L is a linker for linking the protein or polypeptide to the moiety; m is at least 1; q is 0 or more; and the resulting B7H3-binding conjugate binds to B7H3. In particular embodiments, m is 1 to 4 and q is 0 to 8.

[0318] The linker may be composed of one or more linker components. For covalent attachment of the antibody and the drug moiety the linker typically has two reactive functional groups, i.e. bivalency in a reactive sense. Bivalent linker reagents which are useful to attach two or more functional or biologically active moieties, such as peptides, nucleic acids, drugs, toxins, antibodies, haptens, and reporter groups are known, and methods have been described their resulting conjugates (Hermanson, G. T. (1996) Bioconjugate Techniques; Academic Press: New York, p 234-242).

[0319] Exemplary linker components include 6-maleimidocaproyl (“MC”), maleimidopropanoyl (“MP”), valine-citrulline (“val-cit”), a alanine-phenylalanine (“ala-phe”), p-aminobenzyloxycarbonyl (“PAB”), N-Succinimidyl 4-(2-pyridylthio)pentanoate (“SPP”), N-Succinimidyl 4-(N-maleimidomethyl)cyclohexane-I carboxylate (“SMCC”), and N-Succinimidyl (4-iodo-acetyl)aminobenzoate (“SIAB”).

[0320] In some embodiments, the linker may comprise amino acid residues. Exemplary amino acid linker components include a dipeptide, a tripeptide, a tetrapeptide or a pentapeptide. Exemplary dipeptides include: valine-citrulline (vc or val-cit), alanine-phenylalanine (af or ala-phe). Exemplary tripeptides include: glycine-valine-citrulline (gly-val-cit) and glycine-glycine-glycine (gly-gly-gly). Amino acid residues which comprise an amino acid linker component include those occurring naturally, as well as minor amino acids and non-naturally occurring amino acid analogs, such as citrulline Amino acid linker components can be designed and optimized in their selectivity for enzymatic cleavage by a particular enzymes, for example, a tumor-associated protease, cathepsin B, C and D, at a plasmin protease.

[0321] Conjugates of a VHH domain and cytotoxic agent can be made using a variety of bifunctional protein-coupling agents such as N-succinimidyl-3-(2-pyridyldithiol) propionate (SPDP), iminothiolane (IT), bifunctional derivatives of imidoesters (such as dimethyl adipimidate HCl), active esters (such as disuccinimidyl substrate), aldehydes (such as glutaraldehyde), bis-azido compounds (such as bis(p-azidobenzoyl) hexanediamine), bis-diazonium derivatives (such as bis-(p-diazoniumbenzoyl)-ethylenediamine), diisocyanates (such as toluene 2,6-diisocyanate), and bis-active fluorine compounds (such as 1,5-difluoro-2,4-dinitrobenzene).

[0322] The antibody drug conjugate can be prepared by a variety of methods, such as organic chemistry reactions, conditions, and reagents known to those skilled in the art. In one embodiments, methods include: (1) reaction of a nucleophilic group of a VHH domain with a bivalent linker reagent, to form VHH-L, via a covalent bond, followed by reaction with a drug moiety D; and (2) reaction of a nucleophilic group of a drug moiety with a bivalent linker reagent, to form D-L, via a covalent bond, followed by reaction with the nucleophilic group of a VHH domain.

[0323] Nucleophilic groups on antibodies, including VHH domains, include, but are not limited to: (i) N-terminal amine groups, (ii) side chain amine groups, e.g. lysine, (iii) side chain thiol groups, e.g. cysteine, and (iv) sugar hydroxyl or amino groups where the antibody is glycosylated Amine, thiol, and hydroxyl groups are nucleophilic and capable of reacting to form covalent bonds with electrophilic groups on linker moieties and linker reagents including: (i) active esters such as NHS esters, HOBt esters, haloformates, and acid halides; (ii) alkyl and benzyl halides such as haloacetamides; (iii) aldehydes, ketones, carboxyl, and maleimide groups. Additional nucleophilic groups can be introduced into antibodies through the reaction of lysines with 2-iminothiolane (Traut's reagent) resulting in conversion of an amine into a thiol. Reactive thiol groups may be introduced into the antibody (or fragment thereof) by introducing one, two, three, four, or more cysteine residues (e.g., preparing mutant antibodies comprising one or more non-native cysteine amino acid residues).

[0324] Conjugates, such as antibody drug conjugates, may also be produced by modification of an antibody, such as a VHH domain, to introduce electrophilic moieties, which can react with nucleophilic substituents on the linker reagent or drug. The sugars of glycosylated antibodies may be oxidized, e.g., with periodate oxidizing reagents, to form aldehyde or ketone groups which may lead with the amine group of linker reagents or drug moieties. The resulting imine Schiff base groups may form a stable linkage, or may be reduced, e.g., by borohydride reagents to form stable amine linkages In one embodiment, reaction of the carbohydrate portion of a glycosylated antibody with either glactose oxidase or sodium meta-periodate may yield carbonyl (aldehyde and ketone) groups in the protein that can react with appropriate groups on the drug (Hermanson, Bioconjugate Techniques). In another embodiment, proteins containing N-terminal serine or threonine residues can react with sodium meta-periodate, resulting in production of an aldehyde in place of the first amino acid. Such aldehyde can be reacted with a drug moiety or linker nucleophile.

[0325] Likewise, nucleophilic groups on a drug moiety include, but are not limited to amine, thiol, hydroxyl, hydrazide, oxime, hydrazine, thiosemicarbazone, hydrazine carboxylate, and arylhydrazide groups capable of reacting to form covalent bonds with electrophilic groups on linker moieties and linker reagents including: (i) active esters such as NHS esters, HOBi esters, haloformates, and acid halides; (ii) alkyl and benzyl halides such as haloacetamides; (iii) aldehydes, ketones, carboxyl, and maleimide groups.

[0326] Alternatively, a fusion protein containing a VHH domain and cytotoxic agent may be made, e.g., by recombinant techniques or peptide synthesis. The length of DNA may comprise respective regions encoding the two portions of the conjugate either adjacent one another or separated by a region encoding a linker peptide which does not destroy the desired properties of the conjugate.

### C. Multispecific Formats

[0327] Provided herein are B7H3-binding polypeptides that are multispecific containing at least one VHH domain that binds B7H3 and one or more additional binding domains. Typically, the one or more additional domains bind to a second antigen or protein other than B7H3. In some embodiments, the one or more additional domain is an antibody or antigen-binding fragment specific for the second antigen or protein. In some embodiments, the additional domain is a VHH domain.

[0328] In some embodiments, a multispecific B7H3-binding polypeptide comprises at least one VHH domain that binds B7H3 and at least one additional binding domain that binds a second antigen or protein. In some embodiments, this second antigen is a tumor associated antigen (TAA) or tumor microenvironment associated antigen (TMEAA). In some embodiments, this second antigen is an immunomodulatory antigen, wherein said antigen is involved with enhancing or dampening a signaling pathway in an immune cell.

[0329] In some cases, a multispecific B7H3-binding polypeptide can further contain an Fc domain, such as any described above. In some embodiments, a multispecific B7H3-binding polypeptide provided herein at least one VHH domains that bind B7H3, at least one additional binding domain that binds a second antigen or protein, and an Fc domain. In some embodiments, an Fc domain mediates dimerization of the multispecific B7H3-binding polypeptide at physiological conditions such that a dimer is formed that doubles the number of binding sites for B7H3 and for the additional antigen or protein.

[0330] Non-limiting exemplary multispecific B7H3-binding polypeptides are described below.

### 1. Bispecific T Cells Engager

[0331] In some embodiments, the B7H3-binding polypeptide is a bispecific construct that is or comprises at least one B7H3 VHH domain provided herein and at least one additional binding molecule capable of binding to a surface molecule expressed on a T cell. In some embodiments, the surface molecule is an activating component of a T cell, such as a component of the T cell receptor complex. In particular aspects, the surface molecule is an activating T cell antigen that is expressed on a T cell and is capable of inducing T cell activation upon interaction with an antigen binding molecule. For example, in some aspects, interaction of an antigen binding molecule with an activating T cell antigen may induce T cell activation by triggering the signaling cascade of the T cell receptor complex. Suitable assays to measure T cell activation are known, and include any assay to measure or assess proliferation, differentiation, cytokine secretion, cytotoxic activity and/or expression of one or more activation marker. In some embodiments, the simultaneous or near simultaneous binding of such a B7H3-binding polypeptide to both of its targets, B7H3 expressed on target cell and a T cell molecule expressed on a T cell, e.g. activating T cell antigen, can result in a temporary interaction between the target cell and T cell, thereby resulting in activation, e.g. cytotoxic activity, of the T cell and subsequent lysis of the target cell.

[0332] In some embodiments, the T surface molecule, such as activating T cell antigen, is CD3 or is CD2. Specifically, a provided bispecific B7H3-binding polypeptide is capable of specifically binding an activating T cell antigen expressed on a human T cell, such as human CD3 or human CD3. In particular aspects, the additional binding domain that is specific to the activating T cell antigen (e.g. CD3 or CD2) is an antibody or antigen-binding fragment. In some embodiments, a B7H3-binding polypeptide can be a bispecific antibody T cell-engager containing at least one B7H3 VHH domain that specifically binds to B7H3 and an additional binding molecule that is an antibody or antigen-binding fragment specific for an activating component of a T cell (e.g. a T cell surface molecule, e.g. CD3 or CD2).

[0333] Among bispecific antibody T cell-engagers are bispecific T cell engager (BiTE) molecules, which contain tandem scFv molecules fused by a flexible linker (see e.g. Nagorsen and Bauerle, Exp Cell Res 317, 1255-1260 (2011); tandem scFv molecules fused to each other via, e.g. a flexible linker, and that further contain an Fc domain composed of a first and a second subunit capable of stable association (WO2013026837); diabodies and derivatives thereof, including tandem diabodies (Holliger et al, Prot Eng 9, 299-305 (1996); Kipriyanov et al, J Mol Biol 293, 41-66 (1999)); dual affinity retargeting (DART) molecules that can include the diabody format with a C-terminal disulfide bridge; or triomabs that include whole hybrid mouse/rat IgG molecules (Seimetz et al, Cancer Treat Rev 36, 458-467 (2010). Similar formats of any of the above molecules can be generated using any of the B7H3 VHH domains provided herein.

[0334] In some embodiments, the additional binding domain specific to an activating T cell antigen is an antigen-binding fragment selected from a Fab fragment, a F(ab′)₂ fragment, an Fv fragment, a scFv, disulfide stabilized Fv fragment (dsFv), a scAb, a dAb, a single domain heavy chain antibody (VHH), or a single domain light chain antibody. In some embodiments, the additional binding domain is monovalent for binding the activating T cell antigen, such as CD2 or CD3.

[0335] In some embodiments, the additional binding domain is capable of binding to CD3 or a CD3 complex. A CD3 complex is a complex of at least five membrane-bound polypeptides in mature T-lymphocytes that are non-covalently associated with one another and with the T-cell receptor. The CD3 complex includes the gamma, delta, epsilon, zeta, and eta chains (also referred to as subunits). In some embodiments, the additional binding molecule is an antibody or antigen-binding fragment capable of specifically binding to CD3 or a CD3 complex, also called a CD3-binding domain. In some embodiments, the CD3-binding domain capable of binding CD3 or a CD3 complex includes one or more copies of an anti-CD3 Fab fragment, an anti-CD3 F(ab′)₂ fragment, an anti-CD3 Fv fragment, an anti-CD3 scFv, an anti-CD3 dsFv, an anti-CD3 scAb, an anti-CD3 dAb, an anti-CD3 single domain heavy chain antibody (VHH), and an anti-CD3 single domain light chain antibody. In some embodiments, the anti-CD3 binding domain is monovalent for binding CD3.

[0336] In some cases, the CD3-binding domain recognizes the CD3ε-chain. In some embodiments, the anti-CD3ε binding domain includes one or more copies of an anti-CD3ε Fab fragment, an anti-CD3ε F(ab′)₂ fragment, an anti-CD3ε Fv fragment, an anti-CD3ε scFv, an anti-CD3ε dsFv, an anti-CD3ε scAb, an anti-CD3ε dAb, an anti-CD3ε single domain heavy chain antibody (VHH), and an anti-CD3ε single domain light chain antibody. In some embodiments, the anti-CD3ε binding domain is monovalent for binding CD3ε.

[0337] Exemplary monoclonal antibodies against CD3 or a CD3 complex include, but are not limited to, OKT3, SP34, UCHT1 or 64.1, or an antigen-binding fragment thereof (See e.g., June, et al., J. Immunol. 136:3945-3952 (1986); Yang, et al., J. Immunol. 137:1097-1100 (1986); and Hayward, et al., Immunol. 64:87-92 (1988)). In some aspects, clustering of CD3 on T cells, e.g., by immobilized or cell-localized or tethered anti-CD3-antibodies, leads to T cell activation similar to the engagement of the T cell receptor but independent from its clone typical specificity. In one embodiment, the CD3-binding domain monovalently and specifically binds a CD3 antigen, and is derived from OKT3 (ORTHOCLONE-OKT3™ (muromonab-CD3); humanized OKT3 (U.S. Pat. No. 7,635,475 and published international application No. WO2005040220); SP34 (Pessano et ai. The EMBO Journal. 4: 337-344, 1985); humanized variant of SP34 (WO2015001085); Teplizumab™ (MGA031, Eli Lilly); an anti-CD3 binding molecule described in US2011/0275787; UCHT1 (Pollard et al. 1987 J Histochem Cytochem. 35(11):1329-38; WO2000041474); NI0401 (WO2007/033230); visilizumab (U.S. Pat. No. 5,834,597); BC-3 (Anasetti et al., Transplantation 54: 844 (1992); H2C (described in PCT publication no. WO2008/119567); V9 (described in Rodrigues et al., Int J Cancer Suppl 7, 45-50 (1992) and U.S. Pat. No. 6,054,297)). Other anti-CD3 antibodies also can be used in the constructs provided herein, including any described in International published PCT application Nos. WO199404679, WO2008119567, WO2015095392, WO2016204966, WO2019133761; published patent application Nos. US20170369563, US20180194842, US20180355038; U.S. Pat. Nos. 7,728,114, 7,381,803, 7,994,289.

[0338] In some embodiments, the CD3-binding domain contains a variable heavy (VH) chain set forth in SEQ ID NO:209 and/or a variable light chain set forth in SEQ ID NO:210, or VH and/or VL sequences having at least 60%, 70%, 80%, 90%, 95%, 97%, 98%, 99% identity with these sequences and specifically binds CD3. In some embodiments, the CD3-binding domain contains a CDRH1, CDRH2 and CDRH3 of the variable heavy (VH) chain set forth in SEQ ID NO:209 and a CDRL1, CDRL2 and CDRL3 variable light chain set forth in SEQ ID NO:210. In some cases, the CD3-binding region comprisies a humanized version of the VH sequence set forth in SEQ ID NO:209 and a humanized version of the VL sequence set forth in SEQ ID NO:210. In some embodiments a CD3-binding region can contain a humanized OKT3 derived VH domain sequence set forth in any one of SEQ ID NOs 211; 212; 213 and/or a VL domain sequence set forth in any one of SEQ ID NOs 214, 215, 216, or VH and/or VL sequences having at least 60%, 70%, 80%, 90%, 95%, 97%, 98%, 99% identity with these sequences and specifically binds CD3. In some embodiments, the CD3-binding domain is a Fab, scFv, Fv or dsFv, in which is contained any combination of the above VH and VL sequence, particularly any combination of a VH sequence set forth in any of SEQ ID NOS: 211, 212 or 213 and a VL sequence set forth in any of SEQ ID NOS: 214, 215, or 216.

[0339] In some embodiments, the anti-CD3ε binding domain includes a VH CDR1 sequence that includes at least the amino acid sequence TYAMN (SEQ ID NO: 219); a VH CDR2 sequence that includes at least the amino acid sequence RIRSKYNNYATYYADSVKD (SEQ ID NO: 220); a VH CDR3 sequence that includes at least the amino acid sequence HGNFGNSYVSWFAY (SEQ ID NO: 221), a VL CDR1 sequence that includes at least the amino acid sequence RSSTGAVTTSNYAN (SEQ ID NO: 222); a VL CDR2 sequence that includes at least the amino acid sequence GTNKRAP (SEQ ID NO: 223); and a VL CDR3 sequence that includes at least the amino acid sequence ALWYSNLWV (SEQ ID NO: 224). In some embodiments, the CD3-binding domain is a Fab, scFv, Fv or dsFv, in which is contained a VH CDR1 sequence that includes at least the amino acid sequence TYAMN (SEQ ID NO: 219); a VH CDR2 sequence that includes at least the amino acid sequence RIRSKYNNYATYYADSVKD (SEQ ID NO: 220); a VH CDR3 sequence that includes at least the amino acid sequence HGNFGNSYVSWFAY (SEQ ID NO: 221), a VL CDR1 sequence that includes at least the amino acid sequence RSSTGAVTTSNYAN (SEQ ID NO: 222); a VL CDR2 sequence that includes at least the amino acid sequence GTNKRAP (SEQ ID NO: 223); and a VL CDR3 sequence that includes at least the amino acid sequence ALWYSNLWV (SEQ ID NO: 224).

[0340] In some embodiments, the CD3-binding domain contains a variable heavy (VH) chain set forth in SEQ ID NO:217 and/or a variable light chain set forth in SEQ ID NO:218, or VH and/or VL sequences having at least 60%, 70%, 80%, 90%, 95%, 97%, 98%, 99% identity with these sequences and specifically binds to CD3. In some embodiments, the CD3-binding domain contains a CDRH1, CDRH2 and CDRH3 of the variable heavy (VH) chain set forth in SEQ ID NO:217 and a CDRL1, CDRL2 and CDRL3 variable light chain set forth in SEQ ID NO:218. In some embodiments, the CD3-binding domain contains a CDRH1, CDRH2 and CDRH3 set forth in SEQ ID NOs:219, 220 and 221, respectively and a CDRL1, CDRL2 and CDRL3 variable light chain set forth in SEQ ID NO:222, 223 and 224, repectively. In some cases, the CD3-binding region comprises a humanized version of the VH sequence set forth in SEQ ID NO:217 and a humanized version of the VL sequence set forth in SEQ ID NO:218. In some embodiments a CD3-binding region can contain a humanized VH domain sequence set forth in any one of SEQ ID NOs 225-255, 460, 462, or 480 and/or a VL domain sequence set forth in any one of SEQ ID Nos 256-274, 417, 459, or 461, or VH and/or VL sequences having at least 60%, 70%, 80%, 90%, 95%, 97%, 98%, 99% identity with these sequences and specifically binds to CD3. In some embodiments, the anti-CD3ε binding domain thereof includes a variable heavy chain (Hv) comprising the amino acid sequence of SEQ ID NO: 237 and a variable light chain (Lv) comprising the amino acid sequence of SEQ ID NO: 265. In some embodiments, the CD3-binding domain is a Fab, scFv, Fv or dsFv, in which is contained any combination of the above VH and VL sequence, particularly any combination of a VH sequence set forth in any of SEQ ID NOS: 225-255, 460, 462, or 480 and a VL sequence set forth in any of SEQ ID NOS: 256-274, 417, 459, or 461. In some embodiments, the anti-CD3 binding domain is a Fab, scFv, Fv or dsFv, in which is contained a variable heavy chain (Hv) comprising the amino acid sequence of SEQ ID NO: 237 and a variable light chain (Lv) comprising the amino acid sequence of SEQ ID NO: 265.

[0341] In some embodiments, the CD3-binding domain contains a variable heavy (VH) chain set forth in any one of SEQ ID NO:537, 538, 541, or 542. In some embodiments, the CD3-binding domain contains a variable light (VL) chain set forth in any one of SEQ ID NO:539, 540, 543, or 544.

[0342] The provided bispecific constructs can be formatted in any of a number of formats containing the at least one B7H3 VHH domain and the at least one additional domain specific to an activating T cell antigen, such as a CD3-binding domain.

[0343] In one embodiment, the bispecific construct is a bispecific single-domain antibody-linked Fab (S-Fab) containing at least one B7H3 VHH domain as described linked, directly or indirectly to a Fab antigen binding fragment specific to a T cell activating antigen, e.g. CD3, such as an anti-CD3 Fab. The Fab against a T cell activating antigen, e.g. anti-CD3 Fab, can contain any of the VH and VL sequences as described. In some embodiments, the B7H3 VHH domain is linked to the C-terminus of the VH or VL chain of an anti-CD3 Fab. In some embodiments, the S-Fab can be further modified, such as by conjugation with polyethylene glycol (PEG), N-(2-hydroxypropyl) methacrylamide (HPMA) copolymers, proteins (such as albumin), polyglutamic acid or PASylation (Pan et al. (2018) International Jounral of Nanomedicine, 2018: 3189-3201).

[0344] In another embodiment, the bispecific construct is a scFv-single domain antibody in which the construct contains at least one B7H3 VHH as described linked, directly or indirectly, to an scFv containing a VH and a VL of an antigen binding domain specific to a T cell activating antigen, e.g. CD3. The scFv against a T cell activating antigen, e.g. anti-CD3 scFv, can contain any of the VH and VL sequences as described. In some embodiments, the VHH domain and the scFv are connected by a linker, such as a peptide linker. In some embodiments, the peptide linker can be a peptide linker as described herein. In some embodiments, the VHH domain and the scFv are each connected, optionally through a hinge region or a linker (e.g. peptide linker), to an Fc region, such as an N-terminus of an Fc region. The Fc region can be any described herein, such as a human Fc region or a variant thereof, e.g. a human IgG1 Fc region or a variant thereof. In particular examples, the Fc region is formed by variant Fc domains, e.g. variant human IgG1 domains, that are mutated or modified to promote heterodimerization in which different polypeptides can be dimerized to yield a heterodimer.

[0345] In a further embodiment, the CD3-binding domain is a single domain antibody, such as is a VHH domain that specifically binds to CD3. Single domain antibodies, including VHH domains that bind to CD3 are known, see e.g. published U.S. patent application No. US20160280795. In some embodiments, the CD3-binding domain is an anti-CD3 VHH set forth in SEQ ID NO:275, or a sequence that exhibits at least 60%, 70%, 80%, 90%, 95%, 97%, 98%, 99% identity with SEQ ID NO:275 and specifically binds to CD3. In such aspects, a bispecific construct provided herein can include at least one B7H3 VHH domain and at least one CD3 VHH domain.

[0346] For formatting the constructs, in some cases, each VHH domain is connected, optionally through a hinge region or linker (e.g. peptide linker), to an Fc region, such as an N-terminus of an Fc region. The Fc region can be any described herein, such as a human Fc region or a variant thereof, e.g. a human IgG1 Fc region or a variant thereof. In particular examples, the Fc region is formed by variant Fc domains, e.g. variant human IgG1 domains, that are mutated or modified to promote heterodimerization in which different polypeptides can be dimerized to yield a heterodimer.

[0347] In the above embodiments, exemplary modifications of an Fc region to promote heterodimerization are known, including any as described below, e.g. Table 3. In some embodiments, one Fc polypeptide of a heterodimeric Fc comprises the sequence of amino acids set forth in any of SEQ ID NOS:293, 297, 305, 307,445, or 451 and the other Fc polypeptide of the heterodimeric Fc contains the sequence of amino acids set forth in any of SEQ ID NOS:294, 298, 301, 303, 309, 311, 446, 449, or 453. In some embodiments, one Fc polypeptide of a heterodimeric Fc comprises the sequence of amino acids set forth in any of SEQ ID NOS: 295, 299, 306, 308, 447, or 452 and the other Fc polypeptide of the heterodimeric Fc comprises the sequence of amino acids set forth in any of SEQ ID NOS: 296, 300, 302, 304, 310, 312, 448, 450, or 454.

### 2. Constrained CD3 Multispecific Construct

[0348] In some embodiments, the B7H3-binding polypeptide is a multispecific polypeptide construct that is a constrained T-cell engaging fusion protein. In particular aspects, the constrained multispecific constructs provided herein bind an activating T cell antigen, such as a CD3, and B7H3. The constrained multispecific polypeptide constructs provided herein include at least a first component that includes an immunoglobulin Fc region, a second component that includes one or more copies of at least a binding domain that binds CD3 (referred to herein as an anti-CD3 binding domain or a CD3 binding domain, which are terms that are used interchangeably herein), and a linker, such as a polypeptide linker, that joins the first component and the second component. In the provided multispecific polypeptide constructs, one or both of the first and second components contain at least one B7H3 VHH domain, which, when engaged upon binding to antigen, render the constrained CD3 binding region substantially able to bind CD3. FIGS. 3A-3E depict exemplary formats of a constrained multispecific construct.

[0349] In some embodiments, the constrained multispecific polypeptide constructs provided herein exist in two states in terms of capacity to bind CD3 and subsequently activate T-cells: (1) the “inactive” state occurs when there is no binding of any or all of the antigen binding domain(s) to B7H3, such that the CD3 binding is constrained and T-cell interaction is obviated or reduced, and (2) the “active” state occurs upon antigen binding by any or all of the antigen binding domain(s), such that the CD3 binding region is able to bind CD3 and the T-cell interaction is allowed.

[0350] In some embodiments, the Fc region is linked to the CD3 binding domain via a linker or linkers. In some embodiments, the Fc region is linked to the CD3 binding region via a non-cleavable linker or linkers. In some embodiments, the Fc region is linked to the CD3 binding region via a cleavable linker or an otherwise labile linker or linkers. In some embodiments, cleavable linker is a linker that can be specifically cleaved in the presence of a protease. In some aspects, enhanced CD3 binding occurs following cleavage of the cleavable linker. In some such aspects, the “active” state can be further amplified via several mechanisms, including via cleavage of the linker joining the CD3 binding region and the Fc region. In some embodiments, the cleavable linker is a linker that contains a substrate recognition site for a protease. In some embodiments, wherein the Fc region and the CD3 binding region are linked by a cleavable linker, enhanced CD3 binding may occur following cleavage within the linker(s).

[0351] Further, in aspects wherein the Fc region and the CD3 binding region are operably linked by a cleavable linker, cleavage of the linker(s) between the Fc region and the CD3 binding region may separate the constrained multispecific polypeptide constructs into a first and second component. Depending on the composition of the constrained multispecific polypeptide construct, the first and second component may have distinct functionalities. In some embodiments, the Fc region is a region that exhibits one or more effector functions, such as ADCC, CDC or ADCP functions. In such examples, the constrained multispecific polypeptide constructs of the disclosure can be used to produce a self-amplifying system. For example, in some aspects, the incorporation of a protease cleavable linker between the Fc and the components of the CD3 binding domain enables for amplification of the T-cell activating capacity by allowing full exposure of the CD3 binding domain. Depending on the specific linker included, the amplification step can be mediated by tumor associated proteases or by granzymes released following antigen dependent-T-cell activation. If a tumor protease cleavable linker is included the amplification is mediated by the tumor or tumor-microenvironment. Whereas, if a granzyme B cleavable linker is included the amplification may be self-mediated by T-cells following antigen-dependent activation. Furthermore, in cases wherein an effector enabled Fc is included in the construct, amplification may be mediated by granzymes released from NK cell that occurs through an ADCC mechanism.

[0352] The provided constrained multispecific polypeptide constructs include a configuration in which the first component containing the Fc region is N-terminal to the second component containing the CD3 binding region. In such an embodiment, the first and second components are joined via a linker that is C-terminal to the end of the Fc region. In some embodiments, the at least one B7H3 VHH domain is positioned on the amino-terminal (N-term) region of the multispecific polypeptide construct. In some embodiments, the at least one B7H3 VHH domain is positioned on the carboxy-terminal (C-term) region of the multispecific polypeptide construct. In some embodiments, the constrained multispecific polypeptide construct contains at least two B7H3 VHH domains that are positioned on both the N- and C-terminal regions of the multispecific polypeptide construct.

[0353] In some embodiments, the constrained multispecific polypeptide construct is a dimer, in which dimerization is formed by covalent or non-covalent interactions between two polypeptide chains. In some embodiments, the two polypeptide chains are covalently bonded to each other by, for example, interchain disulfide bonds. In some embodiments, the Fc region mediates dimerization via interchain disulfide bonds. In particular embodiments, a constrained multispecific polypeptide construct contains a heterodimeric Fc region in which, in some cases, the polypeptide chains of the multispecific polypeptide construct are different (heterodimer). In particular examples of a heterodimeric multispecific polypeptide construct, the CD3-binding region is a two chain polypeptide containing a VH and a VL chain, such as is an Fv antibody fragment containing the VH and VL. In some embodiments, the Fv antibody fragment includes a disulfide stabilized anti-CD3 binding Fv fragment (dsFv).

[0354] In particular embodiments, the Fv is a disulfide stabilized Fv fragment (dsFv) in which the the V_{H}-V_{L} heterodimer is stabilized by an interchain disulfide bond. In some embodiments, the interchain disulfide bond is engineered by mutation of position in framework positions of the VH and/or VL chain. In some embodiments, the VH chain contains the mutation G44C and the VL chain contains the mutation G100C, each by kabat numbering. In some embodiments, the disulfide stabilized anti-CD3 Fv comprises an anti-CD3 VH with the mutation at position 105 to Cys and an anti-CD3 VL with the mutation position 43 to Cys by Kabat numbering.

[0355] In some embodiments, a constrained multispecific polypeptide construct is formed from or includes two polypeptides, including a first polypeptide comprising a first Fc polypeptide of a heterodimeric Fc region, a linker (e.g. cleavable or non-cleavable linker), a VH domain of an anti-CD3 antibody or antigen binding fragment (e.g. Fv); and a second polypeptide comprising a second Fc polypeptide of the heterodimeric Fc region, the linker (e.g. the cleavable or non-cleavable linker), a VL domain of the anti-CD3 antibody or antigen binding fragment (e.g. Fv). In some embodiments, the first polypeptide contains one or two VHH domains that bind to B7H3. In some embodiments, the second polypeptide contains one or two VHH domains that bind to B7H3. In some embodiments, a constrained multispecific polypeptide construct contains at least two B7H3 VHH domains. In some cases, at least one B7H3 VHH domain is located N-terminally to the Fc polypeptide and at least one B7H3 VHH domain is located C-terminally to the chain of the CD3-binding region.

[0356] In some embodiments, the first polypeptide or second polypeptide or both the first and second polypeptide further include a co-stimulatory receptor binding region (CRBR) that binds a co-stimulatory receptor. In some embodiments, the CRBR of the first and/or second polypeptide can be located N-terminally to the Fc polypeptide and/or C-terminally to the chain of the CD3-binding region.

[0357] In some embodiments, a constrained multispecific polypeptide construct contains at least two VHH domains that bind B7H3 and at least one co-stimulatory receptor binding region (CRBR) that binds a co-stimulatory receptor. In some embodiments, a constrained multispecific polypeptide construct contains (1) a first polypeptide comprising in order of N-terminus to C-terminus: a first B7H3 VHH domain, the first Fc polypeptide of a heterodimeric Fc region, a linker (e.g. a cleavable linker), a chain (e.g. VH or VL) of an anti-CD3 antibody or antigen binding fragment (e.g. Fv or dsFv), and a second B7H3 VHH domain; and (2) a second polypeptide comprising in order of N-terminus to C-terminus: the second Fc polypeptide of the heterodimeric Fc region, the same linker (e.g. same cleavable linker), the other chain (other of the VH or VL) of the anti-CD3 antibody or antigen binding fragment, and a co-stimulatory receptor binding region (CRBR) that binds a co-stimulatory receptor.

[0358] In some embodiments, the first polypeptide or second polypeptide or both the first and second polypeptide further include an inhibitory receptor binding region (IRBR) that binds an inhibitory receptor. In some embodiments, the IRBR of the first and/or second polypeptide can be located N-terminally to the Fc polypeptide and/or C-terminally to the chain of the CD3-binding region.

[0359] In some embodiments, a constrained multispecific polypeptide construct contains at least two VHH domains that bind B7H3 and at least one inhibitory receptor binding region (IRBR) that binds an inhibitory receptor. In some embodiments, a constrained multispecific polypeptide construct contains (1) a first polypeptide comprising in order of N-terminus to C-terminus: a first B7H3 VHH domain, the first Fc polypeptide of a heterodimeric Fc region, a linker (e.g. a cleavable or non-cleavable linker), a chain (e.g. VH or VL) of an anti-CD3 antibody or antigen binding fragment (e.g. Fv or dsFv), and a second B7H3 VHH domain; and (2) a second polypeptide comprising in order of N-terminus to C-terminus: the second Fc polypeptide of the heterodimeric Fc region, the same linker (e.g. same cleavable linker), the other chain (other of the VH or VL) of the anti-CD3 antibody or antigen binding fragment, and an inhibitory receptor binding region (IRBR) that binds an inhibitory receptor.

[0360] In some embodiments, at least one of the first polypeptide or second polypeptide further include a co-stimulatory receptor binding region (CRBR) that binds a co-stimulatory receptor and at least one of the first polypeptide or second polypeptide further includes an inhibitory receptor binding region (IRBR) that binds an inhibitory receptor. In some embodiments, the CRBR of the first and/or second polypeptide can be located N-terminally to the Fc polypeptide and/or C-terminally to the chain of the CD3-binding region. In some embodiments, the IRBR of the first and/or second polypeptide can be located N-terminally to the Fc polypeptide and/or C-terminally to the chain of the CD3-binding region.

[0361] In some embodiments, a constrained multispecific polypeptide construct contains at least two VHH domains that bind B7H3, a co-stimulatory receptor binding region (CRBR) that binds a co-stimulatory receptor and an inhibitory receptor binding region (IRBR) that binds an inhibitory receptor. In some embodiments, a constrained multispecific polypeptide construct contains (1) a first polypeptide comprising in order of N-terminus to C-terminus: a first B7H3 VHH domain, the first Fc polypeptide of a heterodimeric Fc region, a linker (e.g. a cleavable or non-cleavable linker), a chain (e.g. VH or VL) of an anti-CD3 antibody or antigen binding fragment (e.g. Fv or dsFv), and a second B7H3 VHH domain; and (2) a second polypeptide comprising in order of N-terminus to C-terminus: one of an IRBR or CRBR, the second Fc polypeptide of the heterodimeric Fc region, the same linker (e.g. same cleavable or non-cleavable linker), the other chain (other of the VH or VL) of the anti-CD3 antibody or antigen binding fragment, and the other of the IRBR or CRBR.

[0362] Each of the components of the multispecific polypeptide constructs of the disclosure is described in more detail below.

a. B7H3 VHH Antigen Binding Comain

[0363] A constrained multispecific polypeptide construct of the disclosure includes at least one B7H3 VHH domain from among any provided herein. In some embodiments, the B7H3 VHH domain comprises the sequence of amino acids set forth in any of SEQ ID NOS:1-114, 466, 467.

[0364] A constrained multispecific polypeptide construct of the disclosure includes at least one B7H3 VHH domain from among any provided herein. In some embodiments, the B7H3 VHH domain comprises the sequence of amino acids set forth in any of SEQ ID NOS:1-114, 466, 467, 489, 490, or 492-518.

[0365] In particular embodiments, a constrained multispecific polypeptide construct contains at least two B7H3 domain. In some cases, at least one B7H3 VHH domain is positioned amino terminally relative to an Fc polypeptide of the heterodimeric Fc and at least one B7H3 VHH domain is positioned carboxy-terminally relative to VH or VL chain of the CD3 binding region.

[0366] In aspects of a constrained multispecific polypeptide construct containing at least two or containing two B7H3 VHH domains, each of the B7H3 VHH domains can bind to the same or an overlapping epitope on B7H3.

[0367] In aspects of a constrained multispecific polypeptide construct containing at least two or containing two B7H3 VHH domains, each of the B7H3 VHH domains can bind to a different or a non-overlapping epitope on B7H3.

[0368] In some embodiments, the first sdAb VHH domain and second sdAb VHH domain comprises the amino acid sequences set forth in SEQ ID NO: 67 and SEQ ID NO:43. In some embodiments, the first sdAb VHH domain and second sdAb VHH domain comprises the amino acid sequences set forth in SEQ ID NO: 67 and SEQ ID NO:503. In some embodiments, the first sdAb VHH domain and second sdAb VHH domain comprises the amino acid sequences set forth in SEQ ID NO: 67 and SEQ ID NO:67. In some embodiments, the first sdAb VHH domain and second sdAb VHH domain comprises the amino acid sequences set forth in SEQ ID NO: 67 and SEQ ID NO:1. In some embodiments, the first sdAb VHH domain and second sdAb VHH domain comprises the amino acid sequences set forth in SEQ ID NO: 67 and SEQ ID NO:8. In some embodiments, the first sdAb VHH domain and second sdAb VHH domain comprises the amino acid sequences set forth in SEQ ID NO: 467 and SEQ ID NO:466. In some embodiments, the first sdAb VHH domain and second sdAb VHH domain comprises the amino acid sequences set forth in SEQ ID NO: 467 and SEQ ID NO:85.

[0369] In some embodiments, the antigen binding domain, such as a B7H3 VHH domain, is linked, directly or indirectly via a linker, to the Fc region and/or to the CD3 binding region. In some embodiments, linkage is via a linker. In some embodiments, the linker is a linking peptide (LP), which can include any flexible or rigid linker as described. In some embodiments, the linker is selected from the group consisting of GGSGGS, i.e., (GGS)₂ (SEQ ID NO: 191); GGSGGSGGS, i.e., (GGS)₃ (SEQ ID NO: 192); GGSGGSGGSGGS, i.e., (GGS)₄ (SEQ ID NO: 193); and GGSGGSGGSGGSGGS, i.e., (GGS)₅ (SEQ ID NO: 194). In some embodiments, the linker is a flexible linker comprising Glycine residues, such as, by way of non-limiting example, GG, GGG, GGGG (SEQ ID NO: 195), GGGGG (SEQ ID NO: 196), and GGGGGG (SEQ ID NO: 197). In some embodiments, the linker includes a combination of a GS-linker and a Glycine linker.

b. Fc Region

[0370] A constrained multispecific polypeptide construct includes an immunoglobulin Fc region. Generally, the constrained multispecific polypeptide construct is a dimer formed by polypeptides, each containing an Fc. The Fc polypeptide can be any as set forth above.

[0371] In particular embodiments, the Fc region is formed by Fc domains that are mutated or modified to promote heterodimerization in which different polypeptides can be dimerized to yield a heterodimer. Thus, in some embodiments, the dimer is a heterodimer in which two polypeptide chains of the multispecific polypeptide construct are different.

[0372] Various methods are known for promoting heterodimerization of complementary Fc polypeptides, see e.g. Ridgway et al, Protein Eng. 9:617-621 (1996); Merchant et al, Nat. Biotechnol. 16(7): 677-81 (1998); Moore et al. (2011) MAbs, 3:546-57; Von Kreudenstein et al. MAbs, (2013) 5:646-54; Gunasekaran et al. (2010) J. Biol. Chem., 285:19637-46; Leaver-Fay et al. (2016) Structure, 24:641-51; Ha et al. (2016) Frontiers in Immunology, 7:1; Davis et al. (2010) Protein Eng Des Sel, 23:195-202; published international PCT Appl. No. WO 1998/050431, WO 2009/089004, WO2011143545 WO 2014/067011, WO 2012/058768, WO2018027025; published U.S. patent Appl. No. US20140363426, US20150307628, US20180016354, US20150239991; and U.S. Pat. Nos. 5,731,168, 7,183,076, 9,701,759, 9,605,084, and 9,650,446. Methods to promote heterodimerization of Fc chains include mutagenesis of the Fc region, such as by including a set of “knob-into-hole” mutations or including mutations to effect electrostatic steering of the Fc to favor attractive interactions among different polypeptide chains. For example, in some embodiments, the Fc polypeptides of a heterodimer includes a mutation to alter charge polarity across the Fc dimer interface such that co-expression of electrostatically matched Fc chains support favorable attractive interactions thereby promoting desired Fc heterodimer formation, whereas unfavorable repulsive charge interactions suppress unwanted Fc homodimer formation (Guneskaran et al. (2010) JBC, 285: 19637-19646). When co-expressed in a cell, association between the chains is possible but the chains do not substantially self-associate due to charge repulsion. Other strategies for generating a heterodimeric Fc include mixing human IgG and IgA CH3 domain segments to create a complementary CH3 heterodimer, which is referred to as a SEED Fc.

[0373] Methods and variants for heterodimerization also include those described in published international PCT App. WO2014/145806, including “knobs and holes” mutations (also called “skew” variants), mutations that relate to “electrostatic steering” or “charge pairs,” and pI variants. Heterodimeric variants also include any as described in U.S. published Appl. No. US2012/0149876 or US2018/011883.

[0374] In some embodiments, to promote heterodimerization both polypeptides of the Fc heterodimer contain paired or complementary amino acid modifications. Exemplary paired amino acid modification of polypeptides of an Fc fusion are set forth in Table 3.

TABLE 3
Paired amino acids of Heterodimeric Fc

| First Fc polypeptide | Second Fc Polypeptide |
|---|---|
| T366W | T366S/L368W/Y407V |
| T366W/S354C | T366S/L368A/Y407V/Y349C |
| S364H/F405A | Y349T/Y349F |
| T350V/L351Y/F405A/Y407V | T350V/T366L/K392L/T394W |
| K360D/D399M/Y407A | E345R/Q347R/T366V/K409V |
| K409D/K392D | D399K/E356K |
| K360E/K409W | Q347R/D399V/F405T |
| L360E/K409W/Y349C | Q347R/399V/F405T/S354C |
| K370E/K409W | E357N/D399V/F405T |

[0375] In some embodiments, modifications include introduction of a protuberance (knob) into a first Fc polypeptide and a cavity (hole) into a second Fc polypeptide such that the protuberance is positionable in the cavity to promote complexing of the first and second Fc-containing polypeptides. Amino acids targeted for replacement and/or modification to create protuberances or cavities in a polypeptide are typically interface amino acids that interact or contact with one or more amino acids in the interface of a second polypeptide.

[0376] In some embodiments, a first Fc polypeptide that is modified to contain protuberance (hole) amino acids include replacement of a native or original amino acid with an amino acid that has at least one side chain which projects from the interface of the first Fc polypeptide and is therefore positionable in a compensatory cavity (hole) in an adjacent interface of a second polypeptide. Most often, the replacement amino acid is one which has a larger side chain volume than the original amino acid residue. One of skill in the art knows how to determine and/or assess the properties of amino acid residues to identify those that are ideal replacement amino acids to create a protuberance. In some embodiments, the replacement residues for the formation of a protuberance are naturally occurring amino acid residues and include, for example, arginine (R), phenylalanine (F), tyrosine (Y), or tryptophan (W). In some examples, the original residue identified for replacement is an amino acid residue that has a small side chain such as, for example, alanine, asparagine, aspartic acid, glycine, serine, threonine, or valine.

[0377] In some embodiments, a second Fc polypeptide that is modified to contain a cavity (hole) is one that includes replacement of a native or original amino acid with an amino acid that has at least one side chain that is recessed from the interface of the second polypeptide and thus is able to accommodate a corresponding protuberance from the interface of a first polypeptide. Most often, the replacement amino acid is one which has a smaller side chain volume than the original amino acid residue. One of skill in the art knows how to determine and/or assess the properties of amino acid residues to identify those that are ideal replacement residues for the formation of a cavity. Generally, the replacement residues for the formation of a cavity are naturally occurring amino acids and include, for example, alanine (A), serine (S), threonine (T) and valine (V). In some examples, the original amino acid identified for replacement is an amino acid that has a large side chain such as, for example, tyrosine, arginine, phenylalanine, or tryptophan.

[0378] The CH3 interface of human IgG1, for example, involves sixteen residues on each domain located on four anti-parallel β-strands which buries 1090 Å2 from each surface (see e.g., Deisenhofer et al. (1981) Biochemistry, 20:2361-2370; Miller et al., (1990) J Mol. Biol., 216, 965-973; Ridgway et al., (1996) Prot. Engin., 9: 617-621; U.S. Pat. No. 5,731,168). Modifications of a CH3 domain to create protuberances or cavities are described, for example, in U.S. Pat. No. 5,731,168; International Patent Applications WO98/50431 and WO 2005/063816; and Ridgway et al., (1996) Prot. Engin., 9: 617-621. In some examples, modifications of a CH3 domain to create protuberances or cavities are typically targeted to residues located on the two central anti-parallel β-strands. The aim is to minimize the risk that the protuberances which are created can be accommodated by protruding into the surrounding solvent rather than being accommodated by a compensatory cavity in the partner CH3 domain.

[0379] For example, in some embodiments the heterodimeric Fc includes a polypeptide having an amino acid modification within the CH3 domain at Thr366, which when replaced with a more bulky amino acid, e.g., Try (T366W), is able to preferentially pair with a second CH3 domain having amino acid modifications to less bulky amino acids at positions Thr366, Leu368, and Tyr407, e.g., Ser, Ala and Val, respectively (T366S/L368A/Y407V). Heterodimerization via CH3 modifications can be further stabilized by the introduction of a disulfide bond, for example by changing Ser354 to Cys (S354C) and Tyr349 to Cys (Y349C) on opposite CH3 domains (Reviewed in Carter, 2001 Journal of Immunological Methods, 248: 7-15).

[0380] In particular embodiments, a multispecific polypeptide construct contains a first and second Fc₌able to mediate Fc heterodimerization contains a first Fc polypeptide containing mutations T366W and S354C and a second Fc polypeptide containing mutations T366S, L368A, Y407V and Y349C. In some embodiments, the first Fc polypeptide is selected from an Fc polypeptide comprising the sequence set forth in SEQ ID NO: 445 or 451 and the second Fc polypeptide is selected from an Fc polypeptide comprising the sequence set forth in SEQ ID NO: 446, 449 or 453. In some embodiments, the first Fc polypeptide is or comprises the sequence of amino acids set forth in any of SEQ ID NOS: 293, 297, 305 or 307 and the second Fc polypeptide is or comprises the sequence of amino acids set forth in any of SEQ ID NOS: 294, 298, 301, 303, 309 or 311.

[0381] In some embodiments, the Fc polypeptide exhibits features providing Fc-mediated effector functions. In particular examples, the first Fc polypeptide is or comprises the sequence set forth in SEQ ID NOs:445 and a second Fc polypeptide that is or comprises SEQ ID NO: 446 or 449. In some embodiments, the first Fc polypeptide is or comprises the sequence set forth in SEQ ID NO: 293 and the second Fc polypeptide is or comprises the sequence set forth in SEQ ID NO: 294 or 301. In some embodiments, the first Fc polypeptide is or comprises the sequence set forth in SEQ ID NO: 297 and the second Fc polypeptide is or comprises the sequence set forth in SEQ ID NO: 298 or 303. The first and second Fc polypeptide can be formatted on either polypeptide chain of the construct.

[0382] In some embodiments, one or both of the first and second Fc polypeptides can further include one or more amino acid mutations to further reduce one or more Fc effector functions, such as reduced Fc receptor binding. Exemplary mutations to reduce Fc effector functions include any as described. In some embodiments, the modification can be a deletion of one or more positions,Glu233 (E233), Leu234 (L234), or Leu235 (L235), such as a deletion of amino acids Glu233 (E233), Leu234 (L234), and Leu235 (L235). In some embodiments, the first Fc polypeptide is selected from an Fc polypeptide comprising the sequence set forth in SEQ ID NO: 447 or 452 and the second Fc polypeptide is selected from an Fc polypeptide comprising the sequence set forth in SEQ ID NO: 448, 450 or 454. In some embodiments, the first Fc polypeptide is or comprises the sequence of amino acids set forth in any of SEQ ID NOS: 295, 299, 306 or 308 and the second Fc polypeptide is or comprises the sequence of amino acids set forth in any of SEQ ID NOS: 296, 300, 302, 304, 310 or 312.

[0383] In particular examples, the first Fc polypeptide is or comprises the sequence set forth in SEQ ID NOs:447 and a second Fc polypeptide that is or comprises SEQ ID NO: 448 or 450. In some embodiments, the first Fc polypeptide is or comprises the sequence set forth in SEQ ID NO: 295 and the second Fc polypeptide is or comprises the sequence set forth in SEQ ID NO: 296 or 302. In some embodiments, the first Fc polypeptide is or comprises the sequence set forth in SEQ ID NO: 299 and the second Fc polypeptide is or comprises the sequence set forth in SEQ ID NO: 300 or 304. The first and second Fc polypeptide can be formatted on either polypeptide chain of the construct.

[0384] In some embodimetns, the first Fc polypeptide or second Fc polypeptide further includes mutations M252Y and/or M428V. In particular examples, the first Fc polypeptide is or comprises the sequence set forth in SEQ ID NO:451 and the second Fc polypeptide is or comprises the sequence set forth in SEQ ID NO:453. In some embodiments, the first Fc polypeptide is or comprises the sequence set forth in SEQ ID NO:305 and the second Fc polypeptide is or comprises the sequence set forth in SEQ ID NO: 309. In some embodiments, the first Fc polypeptide is or comprises the sequence set forth in SEQ ID NO:307and the second Fc polypeptide is or comprises the sequence set forth in SEQ ID NO: 311. In other examples, the first Fc polypeptide is or comprises the sequence set forth in SEQ ID NO:452 and the second Fc polypeptide is or comprises the sequence set forth in SEQ ID NO:454. In some embodiments, the first Fc polypeptide is or comprises the sequence set forth in SEQ ID NO:306 and the second Fc polypeptide is or comprises the sequence set forth in SEQ ID NO: 310. In some embodiments, the first Fc polypeptide is or comprises the sequence set forth in SEQ ID NO:308 and the second Fc polypeptide is or comprises the sequence set forth in SEQ ID NO: 312. The first and second Fc polypeptide can be formatted on either polypeptide chain of the construct.

[0385] Additional examples of variants that can facilitate the promotion of heterodimers are any combination or pair of steric variants (e.g. skew variants) of a first Fc polypeptide and a second Fc polypeptide from among: S364K/E357Q and L368D/K370S; L368D/K370S and S364K; L368E/K370S and S364K; T411T/E360E/Q362E and D401K; L368D/K370S and S364K/E357L, K370S and S364K/E357Q and T366S/L368A/Y407V and T366W or 366S/L368A/Y407V/Y349C and T366W/S354C), where each pair represents mutations in the first Fc polypeptide and second Fc polypeptide. In particular embodiments, a provided construct contains a first and second Fc polypeptide containing the pair of mutations L368D/K370S and S364K and E357Q.

[0386] An additional mechanism that can be used in the generation of heterodimers is sometimes referred to as “electrostatic steering” as described in Gunasekaran et al., J. Biol. Chem. 285(25):19637 (2010). This is sometimes referred to herein as “charge pairs”. In this embodiment, electrostatics are used to skew the formation towards heterodimerization. As those in the art will appreciate, these may also have an effect on pI, and thus on purification, and thus could in some cases also be considered pI variants. However, as these were generated to force heterodimerization and were not used as purification tools, they are classified as “steric variants”. In one embodiments, a first Fc polypeptide can contain mutations D221E/P228E/L368E and a second Fc polypeptide can contain mutations D221R/P228R/K409R. In another embodiments, a first Fc polypeptide can contain mutations C220E/P228E/368E and a second Fc polypeptide can contain mutations C220R/E224R/P228R/K409R.

[0387] In some embodiments, heterodimerization can be facilitated by pI variants. In some aspects, a pI variant can include those that increase the pI of the protein (basic changes). In other aspects, the pI variant can include those that decrease the pI of the protein (acidic changes). In some cases, all combinations of these variants can be done, including combinations in which one Fc polypeptide may be wild type, or a variant that does not display a significantly different pI from wild-type, and the other Fc polypeptide can be either more basic or more acidic. Alternatively, each Fc polypeptide can be changed, one to more basic and one to more acidic. In some embodiments, at least one Fc polypeptide is a negative pI variant Fc containing mutations Q295E/N384D/Q418E/N421D.

[0388] In some embodiments, a combination of steric heterodimerization variants (e.g. knob and hole) and pI or charge pair variants can be used.

[0389] In particular embodiments, the provided constructs contains (a) a first Fc polypeptide comprising the skew variants S364K/E357Q; and b) a second Fc polypeptide containing skew variants L368D/K370S and the pI variants N208D/Q295E/N384D/Q418E/N421D. In some embodiments, one or both of the first and second polypeptide can contain further mutations to reduce Fc effector activity, such as the exemplary mutations E233P/L234V/L235A/G236del/S267K. An example of such a first Fc polypeptide and a second Fc polypeptide able to mediate Fc heterodimeriztion comprise the sequences set forth in SEQ ID NOs:457 and 458. The first and second Fc polypeptide can be formatted on either polypeptide chain of the construct.

[0390] The resulting constrained multispecific polypeptide constructs can be purified by any suitable method such as, for example, by affinity chromatography over Protein A or Protein G columns Where two nucleic acid molecules encoding different polypeptides are transformed into cells, formation of homo- and heterodimers will occur. Conditions for expression can be adjusted so that heterodimer formation is favored over homodimer formation.

[0391] Techniques for recovery of heterodimers from homodimers based on a differential affinity of the heterodimers for an affinity reagent are known. In some aspects, such techniques include designing a heterodimer so that one of the Fc polypeptide chains does not bind to the affinity reagent protein A. In some cases, one of the polypeptide chain can contain one or more amino acid substitution to abrogate or reduce affinity for the protein A reagent in one of the polypeptides of the Fc heterodimer, see e.g. WO2017134440, WO2010151792, Jendeberg et al. (Jendeberg et al., (1997) J. Immunol. Methods, 201(1): 25-34. In some of these embodiments, the Fc region may be modified at the protein-A binding site on one member of the heterodimer so as to prevent protein-A binding and thereby enable more efficient purification of the heterodimeric fusion protein. An exemplary modification within this binding site is Ile253, for example Ile253Arg (I253R). In some embodiments, the modification may be H435R or H435R/Y436F. In some embodiments, an Fc polypeptide of an Fc heterodimer can contain a modification so that it is capable of binding protein A but not protein G (pA+/pG−). Exemplary pA+/pG− amino acid modifications include an Fc containing serine at position 428, serine at position 434 and optionally histidine at position 436, with reference to human IgG1 or comprising these residues at the corresponding positions in human IgG 2, 3, or 4. In some aspects, such amino acid modifications in one IgG Fc polypeptide at positions 428, 434 and optionally 436 reduces or prevents the binding of protein G, enhancing the purification of the protein.

[0392] In some embodiments, any of such modifications to confer differential affinity to an affinity reagent can be combined with any one or more other amino acid modifications described above. For example, the I253R modification maybe combined with either the T366S/L368A/Y407V modifications or with the T366W modifications. The T366S/L368A/Y407V modified Fc is capable of forming homodimers as there is no steric occlusion of the dimerization interface as there is in the case of the T336W modified Fc. Therefore, in some embodiments, the I253R modification is combined with the T366S/L368A/Y407V modified Fc to disallow purification any homodimeric Fc that may have formed. Similar modifications can be employed by combining T366S/L368A/Y407V and H453R.

[0393] In some embodiments, the Fc regions of the heterodimeric molecule additionally can contain one or more other Fc mutation, such as any described above. In some embodiments, the heterodimer molecule contains an Fc region with a mutation that reduces effector function. In some embodiments, the Fc region is altered to provide reduced Fc-mediated effector functions, such as via reduced Fc receptor binding, e.g. binding to FcγR binding but generally not FcRn binding.

[0394] In some embodiments, the Fc region is mutated in one or more of the following positions to reduce Fc receptor binding: Glu233 (E233), Leu234 (L234), or Leu235 (L235). The one or more mutations can include E233P, L234V and/or L235A.

[0395] In particular embodiments, the mutations of the Fc region to reduce Fc effector function, e.g. via reducing Fc receptor binding to FcγR, include mutations from among any of G236R/L328R, E233P/L234V/L235A/G236del/S239K, E233P/L234V/L235A/G236del/S267K, E233P/L234V/L235A/G236del/S239K/A327G, E233P/L234V/L235A/G236del/S267K/A327G, E233P/L234V/L235A/G236del, D265A/P329A, D265A/P329G, D265A/N297A, L234V/L235A/D265A, L234V/L235A/N297A, L234V/L235A/P329A, or L234V/L235A/P329G. In some embodiments, one Fc polypeptide of a heterodimeric Fc comprises the sequence of amino acids set forth in any of SEQ ID NOS: 445 (eg SEQ ID NO:293 or 297), 451 (eg SEQ ID NO:305 or 307), and the other Fc polypeptide of the heterodimeric Fc contains the sequence of amino acids set forth in any of SEQ ID NOS: 446 (e.g. SEQ ID NO:294 or 298), 449 (e.g. SEQ ID NO:301 or 303), 453 (e.g. SEQ ID NO:309 or 311). In some embodiments, one Fc polypeptide of a heterodimeric Fc comprises the sequence of amino acids set forth in any of SEQ ID NOS: 447 (e.g. SEQ ID NO:295 or 299), 452 (eg SEQ ID NO:306 or 308) and the other Fc polypeptide of the heterodimeric Fc comprises the sequence of amino acids set forth in any of SEQ ID NOS: 448 (e.g. SEQ ID NO:296 or 300), 450 (e.g. SEQ ID NO:302 or 304), 454 (e.g. SEQ ID NO:310 or 312).

[0396] In some embodiments, the Fc region of the provided multispecific polypeptide constructs exhibit one or more effector functions. In some cases, the Fc region is capable of providing Fc-mediated effector functions, such as for example, ADCC (e.g., release of granzyme B by NK cells), ADCP, and/or CDC. In general, the Fc region is responsible for effector functions, such as complement-dependent cytotoxicity (CDC) and antibody-dependent cell cytotoxicity (ADCC), in addition to the antigen-binding capacity, which is the main function of immunoglobulins. Additionally, the FcRn sequence present in the Fc region plays the role of regulating the IgG level in serum by increasing the in vivo half-life by conjugation to an in vivo FcRn receptor. In some embodiments in which the multispecific polypeptide constructs contain a cleavable linker, cleavage of the linker can produce two components that each have biological activity: the CD3-binding region that is able to bind and engage CD3 on a T cell, which, in some aspects, also can contain a CRBR for inducing a costimulatory signal on the T cell and/or an IRBR for inducing an inhibitory signal on the T cell; and the Fc region linked to the B7H3 VHH domain that can exhibit target-specific effector function. In particular embodiments provided herein, the multispecific polypeptide constructs contain a non-cleavable linker and may, in some aspects, not exhibit an independent Fc-mediated effector function.

[0397] In some embodiments, the Fc region includes an Fc polypeptide that is mutated or modified to alter one or more effector functions. Thus, in some cases, effector functions such as on or more of ADCC, ADCP and/or CDC can be altered, such as reduced or enhanced, in an Fc for use with the provided constrained multispecific polypeptide constructs. Exemplary mutations to reduce effector function include any as described above.

[0398] In some embodiments, an IgG1 Fc polypeptide or a variant thereof such as any described below can be made in a G1 m1 or G1 m3 allotype. In some embodiments, the Fc region can contain amino acids of the human G1 m1 allotype, such as residues containing Asp (D) and Leu (L) at positions 356 and 358, e.g. as set forth in SEQ ID NO:198. In some cases, an Fc polypeptide can contain amino acid substitutions E356D and M358L to reconstitute residues of allotype G1 m1. In other embodiments, the Fc region can contain amino acids of the human G1 m3 allotype, such as residues Glu (E) and Met (M) at positions 356 and 358 by EU numbering, e.g. as set forth in SEQ ID NOS: 457 and 458. In some cases, an Fc polypeptide can contain amino acid substitutions D356E and L358M to reconstitute residues of allotype G1 m3.

c. CD3 Binding Domain

[0399] A constrained multispecific polypeptide construct includes one or more copies of an anti-CD3 binding domain. The anti-CD3 binding domains of the disclosure activate T cells via engagement of CD3 or a member of the CD3 complex on the T cells. In preferred embodiments, the anti-CD3 binding domains of the disclosure specifically bind the epsilon chain of CD3, also known as CD3ε. The anti-CD3ε binding domains of the disclosure activate T cells via engagement of CD3ε on the T cells. The anti-CD3 binding domains of the disclosure agonize, stimulate, activate, and/or otherwise augment CD3-mediated T cell activation. Biological activities of CD3 include, for example, T cell activation and other signaling through interaction between CD3 and the antigen-binding subunits of the T-Cell Receptor (TCR). For example, the anti-CD3 binding domains of the disclosure completely or partially activate T cells via engagement of CD3ε on T cells by partially or completely modulating, e.g., agonizing, stimulating, activating or otherwise augmenting CD3-mediated T cell activation.

[0400] The CD3 binding domain can be any as described above. In particular embodiments, the CD3 binding domain is an Fv antibody fragment that binds CD3ε (referred to herein as an anti-CD3ε Fv fragment). In some embodiments, the anti-CD3ε Fv antibody fragment is a disulfide stabilized anti-CD3 binding Fv fragment (dsFv). In some embodiments, the anti-CD3 binding domain is monovalent for binding CD3.

[0401] In some embodiments, the CD3 binding region is an Fv antibody fragment containing a variable heavy chain (Hv, also called VH) and variable light chain (Lv, also called VL), such as any as described. In aspects of such embodiments, the immunoglobulin Fc region is a heterodimeric Fc region containing two different Fc polypeptides capable of heterodimeric association between both polypeptides of the Fc heterodimer, such as any as described. In such embodiments, the variable heavy chain (VH) and variable light chain (VL) of the CD3 binding region are linked on opposite chains of the heterodimeric Fc.

[0402] In some embodiments, the CD3 binding region is an Fv or dsFv of SP34 (Pessano et ai. The EMBO Journal. 4: 337-344, 1985) or of a humanized variant of SP34 (WO2015001085).

[0403] In some embodiments, the anti-CD3ε binding domain thereof is an Fv or dsFv fragment that includes a combination of heavy chain variable amino acid sequence and a light chain variable amino acid sequence. In some embodiments, the CD3-binding domain is an Fv or dsFv fragment in which is contained a VH CDR1 sequence that includes at least the amino acid sequence TYAMN (SEQ ID NO: 219); a VH CDR2 sequence that includes at least the amino acid sequence RIRSKYNNYATYYADSVKD (SEQ ID NO: 220); a VH CDR3 sequence that includes at least the amino acid sequence HGNFGNSYVSWFAY (SEQ ID NO: 221), a VL CDR1 sequence that includes at least the amino acid sequence RSSTGAVTTSNYAN (SEQ ID NO: 222); a VL CDR2 sequence that includes at least the amino acid sequence GTNKRAP (SEQ ID NO: 223); and a VL CDR3 sequence that includes at least the amino acid sequence ALWYSNLWV (SEQ ID NO: 224).

[0404] In some embodiments, the anti-CD3ε binding domain includes a VH CDR1 sequence that is at least 90%, 91%, 92%, 93%, 94%, 95%, 96%, 97%, 98%, 99% or more identical to the amino acid sequence TYAMN (SEQ ID NO: 219); a VH CDR2 sequence that is at least 90%, 91%, 92%, 93%, 94%, 95%, 96%, 97%, 98%, 99% or more identical to the amino acid sequence RIRSKYNNYATYYADSVKD (SEQ ID NO: 220); a VH CDR3 sequence that is at least 90%, 91%, 92%, 93%, 94%, 95%, 96%, 97%, 98%, 99% or more identical to the amino acid sequence HGNFGNSYVSWFAY (SEQ ID NO: 221), a VL CDR1 sequence that is at least 90%, 91%, 92%, 93%, 94%, 95%, 96%, 97%, 98%, 99% or more identical to the amino acid sequence RSSTGAVTTSNYAN (SEQ ID NO: 222); a VL CDR2 sequence that is at least 90%, 91%, 92%, 93%, 94%, 95%, 96%, 97%, 98%, 99% or more identical to the amino acid sequence GTNKRAP (SEQ ID NO: 223); and a VL CDR3 sequence that is at least 90%, 91%, 92%, 93%, 94%, 95%, 96%, 97%, 98%, 99% or more identical to the amino acid sequence ALWYSNLWV (SEQ ID NO: 224).

[0405] In some embodiments, the anti-CD3ε binding domain includes a VH CDR1 sequence that includes at least the amino acid sequence GFTFNTYAMN (SEQ ID NO: 471); a VH CDR2 sequence that includes at least the amino acid sequence RIRSKYNNYATY (SEQ ID NO: 472); a VH CDR3 sequence that includes at least the amino acid sequence HGNFGNSYVSWFAY (SEQ ID NO: 221), a VL CDR1 sequence that includes at least the amino acid sequence RSSTGAVTTSNYAN (SEQ ID NO: 19); a VL CDR2 sequence that includes at least the amino acid sequence GTNKRAP (SEQ ID NO: 20); and a VL CDR3 sequence that includes at least the amino acid sequence ALWYSNLWV (SEQ ID NO: 21).

[0406] In some embodiments, the anti-CD3ε binding domain includes a VH CDR1 sequence that includes at least the amino acid sequence GFTFNTYAMN (SEQ ID NO: 471); a VH CDR2 sequence that includes at least the amino acid sequence RIRSKYNNYATY (SEQ ID NO: 472); a VH CDR3 sequence that includes at least the amino acid sequence HGNFGNSYVSWFAY (SEQ ID NO: 221), a VL CDR1 sequence that includes at least the amino acid sequence RSSTGAVTTSNYAN (SEQ ID NO: 222); a VL CDR2 sequence that includes at least the amino acid sequence GTNKRAP (SEQ ID NO: 223); and a VL CDR3 sequence that includes at least the amino acid sequence ALWYSNLWV (SEQ ID NO: 224).

[0407] In some embodiments, the anti-CD3ε binding domain includes a VH CDR1 sequence that is at least 90%, 91%, 92%, 93%, 94%, 95%, 96%, 97%, 98%, 99% or more identical to the amino acid sequence GFTFNTYAMN (SEQ ID NO: 471); a VH CDR2 sequence that is at least 90%, 91%, 92%, 93%, 94%, 95%, 96%, 97%, 98%, 99% or more identical to the amino acid sequence RIRSKYNNYATY (SEQ ID NO: 472); a VH CDR3 sequence that is at least 90%, 91%, 92%, 93%, 94%, 95%, 96%, 97%, 98%, 99% or more identical to the amino acid sequence HGNFGNSYVSWFAY (SEQ ID NO: 221), a VL CDR1 sequence that is at least 90%, 91%, 92%, 93%, 94%, 95%, 96%, 97%, 98%, 99% or more identical to the amino acid sequence RSSTGAVTTSNYAN (SEQ ID NO: 222); a VL CDR2 sequence that is at least 90%, 91%, 92%, 93%, 94%, 95%, 96%, 97%, 98%, 99% or more identical to the amino acid sequence GTNKRAP (SEQ ID NO: 223); and a VL CDR3 sequence that is at least 90%, 91%, 92%, 93%, 94%, 95%, 96%, 97%, 98%, 99% or more identical to the amino acid sequence ALWYSNLWV (SEQ ID NO: 224).

[0408] In some embodiments, the anti-CD3ε binding domain includes a VH CDR1 sequence that includes at least the amino acid sequence GFTFNTYAMN (SEQ ID NO: 471); a VH CDR2 sequence that includes at least the amino acid sequence RIRSKYNNYATY (SEQ ID NO: 472); a VH CDR3 sequence that includes at least the amino acid sequence HGNFGNSYVSWFAY (SEQ ID NO: 221), a VL CDR1 sequence that includes at least the amino acid sequence GSSTGAVTTSNYAN (SEQ ID NO: 478); a VL CDR2 sequence that includes at least the amino acid sequence GTNKRAP (SEQ ID NO: 479); and a VL CDR3 sequence that includes at least the amino acid sequence ALWYSNHWV (SEQ ID NO: 474).

[0409] In some embodiments, the anti-CD3ε binding domain includes a VH CDR1 sequence that includes at least the amino acid sequence GFTFNTYAMN (SEQ ID NO: 471); a VH CDR2 sequence that includes at least the amino acid sequence RIRSKYNNYATY (SEQ ID NO: 472); a VH CDR3 sequence that includes at least the amino acid sequence HGNFGNSYVSWFAY (SEQ ID NO: 221), a VL CDR1 sequence that includes at least the amino acid sequence GSSTGAVTTSNYAN (SEQ ID NO: 478); a VL CDR2 sequence that includes at least the amino acid sequence GTNKRAP (SEQ ID NO: 223); and a VL CDR3 sequence that includes at least the amino acid sequence ALWYSNHWV (SEQ ID NO: 474).

[0410] In some embodiments, the anti-CD3ε binding domain includes a VH CDR1 sequence that is at least 90%, 91%, 92%, 93%, 94%, 95%, 96%, 97%, 98%, 99% or more identical to the amino acid sequence GFTFNTYAMN (SEQ ID NO: 471); a VH CDR2 sequence that is at least 90%, 91%, 92%, 93%, 94%, 95%, 96%, 97%, 98%, 99% or more identical to the amino acid sequence RIRSKYNNYATY (SEQ ID NO: 472); a VH CDR3 sequence that is at least 90%, 91%, 92%, 93%, 94%, 95%, 96%, 97%, 98%, 99% or more identical to the amino acid sequence HGNFGNSYVSWFAY (SEQ ID NO: 221), a VL CDR1 sequence that is at least 90%, 91%, 92%, 93%, 94%, 95%, 96%, 97%, 98%, 99% or more identical to the amino acid sequence GSSTGAVTTSNYAN (SEQ ID NO: 478); a VL CDR2 sequence that is at least 90%, 91%, 92%, 93%, 94%, 95%, 96%, 97%, 98%, 99% or more identical to the amino acid sequence GTNKRAP (SEQ ID NO: 223); and a VL CDR3 sequence that is at least 90%, 91%, 92%, 93%, 94%, 95%, 96%, 97%, 98%, 99% or more identical to the amino acid sequence ALWYSNHWV (SEQ ID NO: 474). \In some embodiments, the anti-CD3ε binding domain includes a VH CDR1 sequence that is at least 90%, 91%, 92%, 93%, 94%, 95%, 96%, 97%, 98%, 99% or more identical to the amino acid sequence GFTFNTYAMN (SEQ ID NO: 471); a VH CDR2 sequence that is at least 90%, 91%, 92%, 93%, 94%, 95%, 96%, 97%, 98%, 99% or more identical to the amino acid sequence RIRSKYNNYATY (SEQ ID NO: 472); a VH CDR3 sequence that is at least 90%, 91%, 92%, 93%, 94%, 95%, 96%, 97%, 98%, 99% or more identical to the amino acid sequence HGNFGNSYVSWFAY (SEQ ID NO: 221), a VL CDR1 sequence that is at least 90%, 91%, 92%, 93%, 94%, 95%, 96%, 97%, 98%, 99% or more identical to the amino acid sequence GSSTGAVTTSNYAN (SEQ ID NO: 478); a VL CDR2 sequence that is at least 90%, 91%, 92%, 93%, 94%, 95%, 96%, 97%, 98%, 99% or more identical to the amino acid sequence GTNKRAP (SEQ ID NO: 479); and a VL CDR3 sequence that is at least 90%, 91%, 92%, 93%, 94%, 95%, 96%, 97%, 98%, 99% or more identical to the amino acid sequence ALWYSNHWV (SEQ ID NO: 474).

[0411] In some embodiments, the anti-CD3ε binding domain includes a VH CDR1 sequence that includes at least the amino acid sequence GFTFSTYAMN (SEQ ID NO: 476); a VH CDR2 sequence that includes at least the amino acid sequence RIRSKYNNYATY (SEQ ID NO: 477); a VH CDR3 sequence that includes at least the amino acid sequence HGNFGDSYVSWFAY (SEQ ID NO: 473), a VL CDR1 sequence that includes at least the amino acid sequence GSSTGAVTTSNYAN (SEQ ID NO: 478); a VL CDR2 sequence that includes at least the amino acid sequence GTNKRAP (SEQ ID NO: 223); and a VL CDR3 sequence that includes at least the amino acid sequence ALWYSNHWV (SEQ ID NO: 474).

[0412] In some embodiments, the anti-CD3ε binding domain includes a VH CDR1 sequence that is at least 90%, 91%, 92%, 93%, 94%, 95%, 96%, 97%, 98%, 99% or more identical to the amino acid sequence GFTFSTYAMN (SEQ ID NO: 476); a VH CDR2 sequence that is at least 90%, 91%, 92%, 93%, 94%, 95%, 96%, 97%, 98%, 99% or more identical to the amino acid sequence RIRSKYNNYATY (SEQ ID NO: 477); a VH CDR3 sequence that is at least 90%, 91%, 92%, 93%, 94%, 95%, 96%, 97%, 98%, 99% or more identical to the amino acid sequence HGNFGDSYVSWFAY (SEQ ID NO: 473), a VL CDR1 sequence that is at least 90%, 91%, 92%, 93%, 94%, 95%, 96%, 97%, 98%, 99% or more identical to the amino acid sequence GSSTGAVTTSNYAN (SEQ ID NO: 478); a VL CDR2 sequence that is at least 90%, 91%, 92%, 93%, 94%, 95%, 96%, 97%, 98%, 99% or more identical to the amino acid sequence GTNKRAP (SEQ ID NO: 223); and a VL CDR3 sequence that is at least 90%, 91%, 92%, 93%, 94%, 95%, 96%, 97%, 98%, 99% or more identical to the amino acid sequence ALWYSNHWV (SEQ ID NO: 474).

[0413] In some embodiments, the anti-CD3ε binding domain includes a CDR3 that includes at least amino acids VLWYSNRWV (SEQ ID NO:475). In some embodiments, the anti-CD3ε binding domain includes a CDR3 that is at least 90%, 91%, 92%, 93%, 94%, 95%, 96%, 97%, 98%, 99% or more identical to the amino acids VLWYSNRWV (SEQ ID NO:475).

[0414] In some embodiments, the anti-CD3ε binding domain includes one or more copies of an antibody or an antigen-binding fragment thereof selected from the group consisting of a Fab fragment, a F(ab′)₂ fragment, an Fv fragment, a scFv, a scAb, a dAb, a single domain heavy chain antibody, and a single domain light chain antibody. In some embodiments, the anti-CD3 binding domain includes an Fv antibody fragment that binds CD3ε (referred to herein as an anti-CD3ε Fv fragment). In some embodiments, the anti-CD3ε Fv antibody fragment is a disulfide stabilized anti-CD3 binding Fv fragment (dsFv). In some embodiments, the anti-CD3 binding domain is monovalent for binding CD3.

[0415] In some embodiments, the CD3 binding region is not a single chain antibody. For example, in some aspects, the CD3 binding region is not a single chain variable fragment (scFv).

[0416] In some embodiments, the CD3 binding region is an Fv antibody fragment containing a variable heavy chain (Hv, also called VH) and variable light chain (Lv, also called VL), such as any as described. In aspects of such embodiments, the immunoglobulin Fc region is a heterodimeric Fc region containing two different Fc polypeptides capable of heterodimeric association between both polypeptides of the Fc heterodimer, such as any as described in Section III.C.2.b. In such embodiments, the variable heavy chain (VH) and variable light chain (VL) of the CD3 binding region are linked on opposite chains of the heterodimeric Fc.

[0417] In some embodiments, the anti-CD3ε binding domain thereof includes a combination of a heavy chain variable region amino acid sequence and a light chain variable region amino acid sequence comprising an amino acid sequence selected from the group of SEQ ID NO: 225-274, 417, and 459-462. In some embodiments, the anti-CD3ε binding domain thereof includes a combination of a heavy chain variable region amino acid sequence selected from the group of SEQ ID NO: 225-255,460, and 462 and a light chain variable region amino acid sequence comprising an amino acid sequence selected from the group of SEQ ID NO: 256-274, 417, 459, and 461.

[0418] In some embodiments, the anti-CD3ε binding domain thereof includes a combination of a heavy chain variable region amino acid sequence and a light chain variable region amino acid sequence comprising an amino acid sequence selected from the group of SEQ ID NO: 217, 218, 225-274, 417, 459-462 and 480. In some embodiments, the anti-CD3ε binding domain thereof includes a combination of a heavy chain variable region amino acid sequence selected from the group of SEQ ID NO: 217, 225-255, 460, 462 and 480 and a light chain variable region amino acid sequence comprising an amino acid sequence selected from the group of SEQ ID NO: 218, 256-274, 417, 459, and 461.

[0419] In some embodiments, the anti-CD3ε binding domain thereof is an Fv fragment that includes a combination of heavy chain variable amino acid sequence and a light chain variable amino acid sequence. In some embodiments, the anti-CD3ε binding domain thereof includes a combination of a heavy chain variable region amino acid sequence and a light chain variable region amino acid sequence comprising an amino acid sequence selected from the group of SEQ ID NO: 225-274, 417, and 459-462. In some embodiments, the anti-CD3ε binding domain thereof is an Fv fragment that includes a combination of heavy chain variable amino acid sequence and a light chain variable amino acid sequence comprising an amino acid sequence that is at least 90%, 91%, 92%, 93%, 94%, 95%, 96%, 97%, 98%, 99% or more identical to an amino acid sequence selected from the group consisting of SEQ ID NOs: 225-274, 417, and 459-462.

[0420] In some embodiments, the anti-CD3ε binding domain thereof is an Fv fragment that includes a combination of heavy chain variable amino acid sequence and a light chain variable amino acid sequence. In some embodiments, the anti-CD3ε binding domain thereof includes a combination of a heavy chain variable region amino acid sequence and a light chain variable region amino acid sequence comprising an amino acid sequence selected from the group of SEQ ID NO: 217, 218, 225-274, 417, 459-462 and 480. In some embodiments, the anti-CD3ε binding domain thereof is an Fv fragment that includes a combination of heavy chain variable amino acid sequence and a light chain variable amino acid sequence comprising an amino acid sequence that is at least 90%, 91%, 92%, 93%, 94%, 95%, 96%, 97%, 98%, 99% or more identical to an amino acid sequence selected from the group consisting of SEQ ID NOs: 217, 218, 225-274, 417, 459-462 and 480.

[0421] In some embodiments, the anti-CD3ε binding domain thereof is an Fv, such as a dsFv fragment, that includes a heavy chain variable amino acid sequence that is at least 90%, 91%, 92%, 93%, 94%, 95%, 96%, 97%, 98%, 99% or more identical to an amino acid sequence selected from the group consisting of SEQ ID NO: 225-255,460, and 462 and a light chain variable amino acid sequence that is at least 90%, 91%, 92%, 93%, 94%, 95%, 96%, 97%, 98%, 99% or more identical to an amino acid sequence selected from the group consisting of SEQ ID NO: 256-274, 417, 459, and 461. In some embodiments, the anti-CD3ε binding domain thereof includes a combination of a heavy chain variable region amino acid sequence selected from the group of SEQ ID NO: 225-255,460, and 462 and a light chain variable region amino acid sequence comprising an amino acid sequence selected from the group of SEQ ID NO: 256-274, 417, 459, and 461. In some embodiments, the anti-CD3ε binding domain thereof is an Fv, such as a dsFv fragment, that includes a heavy chain variable amino acid sequence selected from the group of SEQ ID NO: 225-255, 460 and 462 and a light chain variable amino acid sequence selected from the group consisting of SEQ ID NO: 256-274, 417, 459 and 461. In some embodiments, the anti-CD3 binding domain is an Fv, such as a dsFv, in which is contained a variable heavy chain (VH) comprising the amino acid sequence of SEQ ID NO: 237 and a variable light chain (VL) comprising the amino acid sequence of SEQ ID NO: 265. In some embodiments, the anti-CD3 binding domain is an Fv or dsFv, in which is contained a variable heavy chain (VH) comprising the amino acid sequence of SEQ ID NO: 237 and a variable light chain (VL) comprising the amino acid sequence of SEQ ID NO: 417.

[0422] In some embodiments, the anti-CD3ε binding domain thereof is an Fv fragment that includes a combination of heavy chain variable amino acid sequence selected from the group of SEQ ID NO: 217, 225-255,460, 462 and 480 and light chain variable amino acid sequence selected from the group consisting of SEQ ID NO: 218, 256-274, 417, 459, and 461. In some embodiments, the anti-CD3ε binding domain thereof is an Fv fragment that includes a combination of heavy chain variable amino acid sequence that is at least 90%, 91%, 92%, 93%, 94%, 95%, 96%, 97%, 98%, 99% or more identical to an amino acid sequence selected from the group consisting of SEQ ID NO: 217, 225-255,460, 462 and 480 and a light chain variable amino acid sequence that is at least 90%, 91%, 92%, 93%, 94%, 95%, 96%, 97%, 98%, 99% or more identical to an amino acid sequence selected from the group consisting of SEQ ID NO: 218, 256-274, 417, 459, and 461.

[0423] In some embodiments, the anti-CD3ε Fv antibody fragment includes a combination of a heavy chain variable amino acid sequence that is at least 90%, 91%, 92%, 93%, 94%, 95%, 96%, 97%, 98%, 99% or more identical to an amino acid sequence selected from the group consisting of SEQ ID NO: 217, 225-236, 238-240, 460, and 241 and a light chain variable amino acid sequence that is at least 90%, 91%, 92%, 93%, 94%, 95%, 96%, 97%, 98%, 99% or more identical to an amino acid sequence selected from the group consisting of SEQ ID NO: 218, 256, 258-264, 266, 268, 270, and 461. In some embodiments, the anti-CD3ε Fv antibody fragment includes a combination of a heavy chain variable amino acid sequence selected from the group of SEQ ID NO: 217, 225-236, 238-240, 460, and 241 and a light chain variable amino acid sequence selected from the group consisting of SEQ ID NO: 218, 256, 258-264, 266, 268, 270, 459 and 461.

[0424] In some embodiments, the anti-CD3ε binding domain thereof includes a variable heavy chain (VH) comprising an amino acid sequence that is at least 90%, 91%, 92%, 93%, 94%, 95%, 96%, 97%, 98%, 99% or more identical to the amino acid sequence of SEQ ID NO:217. In some embodiments, the anti-CD3ε binding domain includes a variable light chain (VL) comprising an amino acid sequence that is at least 90%, 91%, 92%, 93%, 94%, 95%, 96%, 97%, 98%, 99% or more identical to the amino acid sequence of SEQ ID NO: 218. In some embodiments, the anti-CD3ε binding domain thereof includes a variable heavy chain (VH) comprising an amino acid sequence that is at least 90%, 91%, 92%, 93%, 94%, 95%, 96%, 97%, 98%, 99% or more identical to the amino acid sequence of SEQ ID NO: 217 and a variable light chain (VL) comprising an amino acid sequence that is at least 90%, 91%, 92%, 93%, 94%, 95%, 96%, 97%, 98%, 99% or more identical to the amino acid sequence of SEQ ID NO: 218. In some embodiments, the anti-CD3ε binding domain thereof includes a variable heavy chain (VH) comprising the amino acid sequence of SEQ ID NO: 217. In some embodiments, the anti-CD3ε binding domain includes a variable light chain (VL) comprising the amino acid sequence of SEQ ID NO: 218. In some embodiments, the anti-CD3ε binding domain thereof includes a variable heavy chain (VH) comprising the amino acid sequence of SEQ ID NO: 217 and a variable light chain (VL) comprising the amino acid sequence of SEQ ID NO: 218.

[0425] In some embodiments, the anti-CD3ε binding domain thereof includes a variable heavy chain (VH) comprising an amino acid sequence that is at least 90%, 91%, 92%, 93%, 94%, 95%, 96%, 97%, 98%, 99% or more identical to the amino acid sequence of SEQ ID NO: 460. In some embodiments, the anti-CD3ε binding domain includes a variable light chain (VL) comprising an amino acid sequence that is at least 90%, 91%, 92%, 93%, 94%, 95%, 96%, 97%, 98%, 99% or more identical to the amino acid sequence of SEQ ID NO: 461. In some embodiments, the anti-CD3ε binding domain thereof includes a variable heavy chain (VH) comprising an amino acid sequence that is at least 90%, 91%, 92%, 93%, 94%, 95%, 96%, 97%, 98%, 99% or more identical to the amino acid sequence of SEQ ID NO: 460 and a variable light chain (VL) comprising an amino acid sequence that is at least 90%, 91%, 92%, 93%, 94%, 95%, 96%, 97%, 98%, 99% or more identical to the amino acid sequence of SEQ ID NO: 461. In some embodiments, the anti-CD3ε binding domain thereof includes a variable heavy chain (VH) comprising the amino acid sequence of SEQ ID NO: 460. In some embodiments, the anti-CD3ε binding domain includes a variable light chain (VL) comprising the amino acid sequence of SEQ ID NO: 461. In some embodiments, the anti-CD3ε binding domain thereof includes a variable heavy chain (VH) comprising the amino acid sequence of SEQ ID NO: 460 and a variable light chain (VL) comprising the amino acid sequence of SEQ ID NO: 461.

[0426] In particular embodiments, the Fv is a disulfide stabilized Fv fragment (dsFv) in which the the V_{H}-V_{L} heterodimer is stabilized by an interchain disulfide bond. In some embodiments, the interchain disulfide bond is engineered by mutation of position in framework positions of the VH and/or VL chain. In some embodiments, the disulfide stabilized anti-CD3 Fv comprises an anti-CD3 VH with the mutation 44 to Cys and an anti-CD3 VL with the mutation 100 to Cys by Kabat numbering. For example, in some embodiments, the VH chain contains the mutation G44C and the VL chain contains the mutation G100C, each by kabat numbering. In some embodiments, the disulfide stabilized anti-CD3 Fv comprises an anti-CD3 VH with the mutation at position 105 to Cys and an anti-CD3 VL with the mutation position 43 to Cys by Kabat numbering.

[0427] In some embodiments, the anti-CD3ε Fv antibody fragment includes a combination of a variable heavy chain amino acid sequence that is at least 90%, 91%, 92%, 93%, 94%, 95%, 96%, 97%, 98%, 99% or more identical to an amino acid sequence selected from the group consisting of SEQ ID NO: 237 and 242-255, and 462 and a variable light chain amino acid sequence that is at least 90%, 91%, 92%, 93%, 94%, 95%, 96%, 97%, 98%, 99% or more identical to an amino acid sequence selected from the group consisting of SEQ ID NO: 257, 265, 267, 269, 271-274, 417, and 459. In some of any such embodiments, the anti-CD3 Fv is a dsFv that has a VH chain containing the mutation G44C and a VL chain containing the mutation G100C, each by kabat numbering. In some embodiments, the anti-CD3ε Fv antibody fragment includes a combination of a variable heavy chain amino acid sequence selected from the group of SEQ ID NO: 237 and 242-255, and 462 and a variable light chain amino acid sequence selected from the group consisting of SEQ ID NO: 257, 265, 267, 269, 271-274, 417, and 459.

[0428] In some embodiments, the anti-CD3ε Fv antibody fragment includes a combination of a variable heavy chain amino acid sequence that is at least 90%, 91%, 92%, 93%, 94%, 95%, 96%, 97%, 98%, 99% or more identical to an amino acid sequence selected from the group consisting of SEQ ID NO: 237 and 242-255, 462 and 480 and a variable light chain amino acid sequence that is at least 90%, 91%, 92%, 93%, 94%, 95%, 96%, 97%, 98%, 99% or more identical to an amino acid sequence selected from the group consisting of SEQ ID NO: 257, 265, 267, 269, 271-274, 417, and 459. In some of any such embodiments, the anti-CD3 Fv is a dsFv that has a VH chain containing the mutation G44C and a VL chain containing the mutation G100C, each by kabat numbering. In some embodiments, the anti-CD3ε Fv antibody fragment includes a combination of a variable heavy chain amino acid sequence selected from the group of SEQ ID NO: 237 and 242-255, 462 and 480 and a variable light chain amino acid sequence selected from the group consisting of SEQ ID NO: 257, 265, 267, 269, 271-274, 417, and 459.

[0429] In some embodiments, the anti-CD3ε binding domain thereof includes a variable heavy chain (VH) comprising an amino acid sequence that is at least 90%, 91%, 92%, 93%, 94%, 95%, 96%, 97%, 98%, 99% or more identical to the amino acid sequence of SEQ ID NO: 237 In some embodiments, the anti-CD3ε binding domain includes a variable light chain (VL) comprising an amino acid sequence that is at least 90%, 91%, 92%, 93%, 94%, 95%, 96%, 97%, 98%, 99% or more identical to the amino acid sequence of SEQ ID NO: 265. In some embodiments, the anti-CD3ε binding domain thereof includes a variable heavy chain (VH) comprising an amino acid sequence that is at least 90%, 91%, 92%, 93%, 94%, 95%, 96%, 97%, 98%, 99% or more identical to the amino acid sequence of SEQ ID NO: 237 and a variable light chain (VL) comprising an amino acid sequence that is at least 90%, 91%, 92%, 93%, 94%, 95%, 96%, 97%, 98%, 99% or more identical to the amino acid sequence of SEQ ID NO: 265. In some of any such embodiments, the anti-CD3 Fv is a dsFv that has a VH chain containing the mutation G44C and a VL chain containing the mutation G100C, each by kabat numbering. In some embodiments, the anti-CD3ε binding domain thereof includes a variable heavy chain (VH) comprising the amino acid sequence of SEQ ID NO: 237. In some embodiments, the anti-CD3ε binding domain includes a variable light chain (VL) comprising the amino acid sequence of SEQ ID NO: 265. In some embodiments, the anti-CD3ε binding domain thereof includes a variable heavy chain (VH) comprising the amino acid sequence of SEQ ID NO: 237 and a variable light chain (VL) comprising the amino acid sequence of SEQ ID NO: 265.

[0430] In some embodiments, the anti-CD3ε binding domain thereof includes a variable heavy chain (VH) comprising an amino acid sequence that is at least 90%, 91%, 92%, 93%, 94%, 95%, 96%, 97%, 98%, 99% or more identical to the amino acid sequence of SEQ ID NO: 462. In some embodiments, the anti-CD3ε binding domain includes a variable light chain (VL) comprising an amino acid sequence that is at least 90%, 91%, 92%, 93%, 94%, 95%, 96%, 97%, 98%, 99% or more identical to the amino acid sequence of SEQ ID NO: 459. In some embodiments, the anti-CD3ε binding domain thereof includes a variable heavy chain (VH) comprising an amino acid sequence that is at least 90%, 91%, 92%, 93%, 94%, 95%, 96%, 97%, 98%, 99% or more identical to the amino acid sequence of SEQ ID NO: 462 and a variable light chain (VL) comprising an amino acid sequence that is at least 90%, 91%, 92%, 93%, 94%, 95%, 96%, 97%, 98%, 99% or more identical to the amino acid sequence of SEQ ID NO: 459. In some of any such embodiments, the anti-CD3 Fv is a dsFv that has a VH chain containing the mutation G44C and a VL chain containing the mutation G100C, each by kabat numbering. In some embodiments, the anti-CD3ε binding domain thereof includes a variable heavy chain (VH) comprising the amino acid sequence of SEQ ID NO: 462. In some embodiments, the anti-CD3ε binding domain includes a variable light chain (VL) comprising the amino acid sequence of SEQ ID NO: 459. In some embodiments, the anti-CD3ε binding domain thereof includes a variable heavy chain (VH) comprising the amino acid sequence of SEQ ID NO: 462 and a variable light chain (VL) comprising the amino acid sequence of SEQ ID NO: 459.

[0431] In some embodiments, the anti-CD3ε binding domain thereof includes a variable heavy chain (VH) comprising an amino acid sequence that is at least 90%, 91%, 92%, 93%, 94%, 95%, 96%, 97%, 98%, 99% or more identical to the amino acid sequence of SEQ ID NO: 480. In some embodiments, the anti-CD3ε binding domain includes a variable light chain (VL) comprising an amino acid sequence that is at least 90%, 91%, 92%, 93%, 94%, 95%, 96%, 97%, 98%, 99% or more identical to the amino acid sequence of SEQ ID NO: 459. In some embodiments, the anti-CD3ε binding domain thereof includes a variable heavy chain (VH) comprising an amino acid sequence that is at least 90%, 91%, 92%, 93%, 94%, 95%, 96%, 97%, 98%, 99% or more identical to the amino acid sequence of SEQ ID NO: 480 and a variable light chain (VL) comprising an amino acid sequence that is at least 90%, 91%, 92%, 93%, 94%, 95%, 96%, 97%, 98%, 99% or more identical to the amino acid sequence of SEQ ID NO: 459. In some of any such embodiments, the anti-CD3 Fv is a dsFv that has a VH chain containing the mutation G44C and a VL chain containing the mutation G100C, each by kabat numbering. In some embodiments, the anti-CD3ε binding domain thereof includes a variable heavy chain (VH) comprising the amino acid sequence of SEQ ID NO: 480. In some embodiments, the anti-CD3ε binding domain includes a variable light chain (VL) comprising the amino acid sequence of SEQ ID NO: 459. In some embodiments, the anti-CD3ε binding domain thereof includes a variable heavy chain (VH) comprising the amino acid sequence of SEQ ID NO: 480 and a variable light chain (VL) comprising the amino acid sequence of SEQ ID NO: 459.

d. Linker

[0432] A constrained multispecific polypeptide constructs contain a linker that joins or couples the first component containing the immunoglobulin Fc region and the second component containing the CD3 binding region. In some embodiments, the linker is positioned at the end of the C-terminal region of the Fc region, such that the Fc region is N-terminal to the CD3 binding region. It is understood that because the provided constrained multispecific polypeptide constructs are multimers, such as dimers containing a first and second polypeptide that together form the first and second component, the provided constructs include a linker joining the Fc portion and the CD3 binding region of the first and a linker joining the Fc portion and the CD3 binding region of the second polypeptide. In some embodiments, the first polypeptide includes a first Fc polypeptide of a heterodimeric Fc region, a linker, and a first domain (e.g. VH) of a CD3 binding region, and the second polypeptide includes a second Fc polypeptide of the heterodimeric Fc region, a linker and second domain (e.g. VL) of the CD3 binding region. Typically, the linkers present in the first and second polypeptides of the constrained multispecific polypeptide construct are the same. Thus, in some embodiments, each domain of the CD3 binding domain is linked via a linker, such as the same linker, to opposite polypeptides of the Fc, such as heterodimeric Fc.

[0433] Various polypeptide linkers for use in fusion proteins are known (see e.g. Chen et al. (2013) Adv. Drug. Deliv. 65:1357-1369; and International PCT publication No. WO 2014/099997, WO2000/24884; U.S. Pat. Nos. 5,258,498; 5,525,491; 5,525,491, 6,132,992).

[0434] In some embodiments, the linker is chosen so that, when the CD3 binding region is joined to the Fc region of the multispecific polypeptide conjugate, the CD3 binding region is constrained and not able to, or not substantially able to, bind or engage CD3 on the surface of a cell, e.g. T cell, upon contact of the multispecific polypeptide construct with the cell. Various assays can be employed to assess binding or engagement of CD3 by the multispecific polypeptide construct, including assays to assess T cell binding, NFAT activation using a reporter system, cytolytic T cell activity, cytokine production and/or expression of T cell activation markers. Exemplary assays are shown in the provided Examples. Typically, the linker also is one that ensures correct folding of the polypeptide construct, does not exhibit a charge that would be inconsistent with the activity or function of the linked polypeptides or form bonds or other interactions with amino acid residues in one or more of the domains that would impede or alter activity of the linked polypeptides. In some embodiments, the linker is a polypeptide linker The polypeptide linker can be a flexible linker or a rigid linker or a combination of both. In some aspects, the linker is a short, medium or long linker. In some embodiments, the linker is up to 40 amino acids in length. In some embodiments, the linker is up to 25 amino acids in length. In some embodiments, the linker is at least or is at least about 2 amino acids in length. In some aspects, a suitable length is, e.g., a length of at least one and typically fewer than about 40 amino acid residues, such as 2-25 amino acid residues, 5-20 amino acid residues, 5-15 amino acid residues, 8-12 amino acid . In some embodiments, the linker is from or from about 2 to 24 amino acids, 2 to 20 amino acids, 2 to 18 amino acids, 2 to 14 amino acids, 2 to 12 amino acids, 2 to 10 amino acids, 2 to 8 amino acids, 2 to 6 amino acids, 6 to 24 amino acids, 6 to 20 amino acids, 6 to 18 amino acids, 6 to 14 amino acids, 6 to 12 amino acids, 6 to 10 amino acids, 6 to 8 amino acids, 8 to 24 amino acids, 8 to 20 amino acids, 8 to 18 amino acids, 8 to 14 amino acids, 8 to 12 amino acids, 8 to 10 amino acids, 10 to 24 amino acids, 10 to 20 amino acids, 10 to 18 amino acids, 10 to 14 amino acids, 10 to 12 amino acids, 12 to 24 amino acids, 12 to 20 amino acids, 12 to 18 amino acids, 12 to 14 amino acids, 14 to 24 amino acids, 14 to 20 amino acids, 14 to 18 amino acids, 18 to 24 amino acids, 18 to 20 amino acids or 20 to 24 amino acids. In some embodiments, the linker is 2, 3, 4, 5, 6, 7, 8, 9, 10, 11, 12, 13, 14, 15, 16, 17, 18, 19 or 20 amino acids in length.

[0435] In certain aspects, the longer the linker length, the greater the CD3 binding when the multispecific polypeptide conjugate is bounds to its antigen, e.g. TAA. Thus, in some aspects, the linker is greater than 12 amino acids in length, such as greater than 13, 14, 15, 16, 17 or 18 amino acids in length. In some embodiments, the linker is 12 to 40 amino acids in length, 12 to 30 amino acids, 12 to 24 amino acids, 12 to 18 acids, 12 to 15 amino acids, 15 to 40 amino acids, 15 to 30 amino acids, 15 to 24 amino acids, 15 to 18 amino acids, 18 to 40 amino acids, 18 to 30 amino acids, 18 to 24 amino acids, 24 to 40 amino acids, 24 to 30 amino acids or 30 to 40 amino acids.

[0436] The linkers can be naturally occurring, synthetic or a combination of both. Particularly suitable linker polypeptides predominantly include amino acid residues selected from Glycine (Gly), Serine (Ser), Alanine (Ala), and Threonine (Thr). For example, the linker may contain at least 75% (calculated on the basis of the total number of residues present in the peptide linker), such as at least 80%, at least 85%, or at least 90% of amino acid residues selected from Gly, Ser, Ala, and Thr. The linker may also consist of Gly, Ser, Ala and/or Thr residues only. In some embodiments, the linker contains 1-25 glycine residues, 5-20 glycine residues, 5-15 glycine residues, or 8-12 glycine residues. In some aspects, suitable peptide linkers typically contain at least 50% glycine residues, such as at least 75% glycine residues. In some embodiments, a peptide linker comprises glycine residues only. In some embodiments, a peptide linker comprises glycine and serine residues only.

[0437] In some embodiments, these linkers are composed predominately of the amino acids Glycine and Serine, denoted as GS-linkers herein. In some embodiments, the linker contains (GGS)n, wherein n is 1 to 10, such as 1 to 5, for example 1 to 3, such as GGS(GGS)n (SEQ ID NO:491), wherein n is 0 to 10. In particular embodiments, the linker contains the sequence (GGGGS)n (SEQ ID NO: 313), wherein n is 1 to 10 or n is 1 to 5, such as 1 to 3. In further embodiments, the linker contains (GGGGGS)n (SEQ ID NO:314), wherein n is 1 to 4, such as 1 to 3. The linker can include combinations of any of the above, such as repeats of 2, 3, 4, or 5 GS, GGS, GGGGS, and/or GGGGGS linkers may be combined. In some embodiments, such a linker is 2, 3, 4, 5, 6, 7, 8, 9, 10, 11, 12, 13, 14, 15, 16, 17, 18 or 19 amino acids in length.

[0438] In some embodiments, the linker is (in one-letter amino acid code): GGS, GGGGS (SEQ ID NO: 315), or GGGGGS (SEQ ID NO: 316). In some embodiments, the GS-linker comprises an amino acid sequence of GGSGGS, i.e., (GGS)₂ (SEQ ID NO: 191); GGSGGSGGS, i.e., (GGS)₃ (SEQ ID NO: 192); GGSGGSGGSGGS, i.e., (GGS)₄ (SEQ ID NO: 193); GGSGGSGGSGGSGGS, i.e., (GGS)₅ (SEQ ID NO: 194); GGGGGSGGGGGSGGGGGS, i.e., (G5S)₃ (SEQ ID NO: 317), GGSGGGGSGGGGSGGGGS (SEQ ID NO: 319) and GGGGSGGGGSGGGGS (SEQ ID NO:318). In some embodiments, the linker is GGGGG (SEQ ID NO:196). In some embodiments, the linker is PGGGG (SEQ ID NO:444). In some embodiments, the linker is GGGG (SEQ ID NO:195). In some of any of the above examples, serine can be replaced with alanine (e.g., (Gly4Ala) or (Gly3Ala)).

[0439] In some embodiments, the linker includes a peptide linker having the amino acid sequence GlyₓXaa-Gly_{y}-Xaa-Gly_{z} (SEQ ID NO:320), wherein each Xaa is independently selected from Alanine (Ala), Valine (Val), Leucine (Leu), Isoleucine (Ile), Methionine (Met), Phenylalanine (Phe), Tryptophan (Trp), Proline (Pro), Glycine (Gly), Serine (Ser), Threonine (Thr), Cysteine (Cys), Tyrosine (Tyr), Asparagine (Asn), Glutamine (Gln), Lysine (Lys), Arginine (Arg), Histidine (His), Aspartate (Asp), and Glutamate (Glu), and wherein x, y, and z are each integers in the range from 1-5. In some embodiments, each Xaa is independently selected from the group consisting of Ser, Ala, and Thr. In a specific variation, each of x, y, and z is equal to 3 (thereby yielding a peptide linker having the amino acid sequence Gly-Gly-Gly-Xaa-Gly-Gly-Gly-Xaa-Gly-Gly-Gly (SEQ ID NO:321), wherein each Xaa is selected as above.

[0440] In some embodiments, the linker is serine-rich linkers based on the repetition of a (SSSSG)n (SEQ ID NO:322) motif where n is at least 1, though y can be 2, 3, 4, 5, 6, 7, 8 and 9.

[0441] In some cases, it may be desirable to provide some rigidity into the peptide linker. This may be accomplished by including proline residues in the amino acid sequence of the peptide linker. Thus, in some embodiments, a linker comprises at least one proline residue in the amino acid sequence of the peptide linker For example, a peptide linker can have an amino acid sequence wherein at least 25% (e.g., at least 50% or at least 75%) of the amino acid residues are proline residues. In one particular embodiment, the peptide linker comprises proline residues only.

[0442] In some aspects, a peptide linker comprises at least one cysteine residue, such as one cysteine residue. For example, in some embodiments, a linker comprises at least one cysteine residue and amino acid residues selected from the group consisting of Gly, Ser, Ala, and Thr. In some such embodiments, a linker comprises glycine residues and cysteine residues, such as glycine residues and cysteine residues only. Typically, only one cysteine residue will be included per peptide linker. One example of a specific linker comprising a cysteine residue includes a peptide linker having the amino acid sequence Glyₘ-Cys-Glyₙ, wherein n and m are each integers from 1-12, e.g., from 3-9, from 4-8, or from 4-7. In a specific variation, such a peptide linker has the amino acid sequence GGGGG-C-GGGGG (SEQ ID NO:323).

[0443] In some embodiments, the linker of the fusion protein is a structured or constrained linker. In particular embodiments, the structured linker contains the sequence (AP)n or (EAAAK)n (SEQ ID NO:134), wherein n is 2 to 20, preferably 4 to 10, including but not limited to, AS-(AP)n-GT (SEQ ID NO:135) or AS-(EAAAK)n-GT (SEQ ID NO:136), wherein n is 2 to 20, such as 2, 3, 4, 5, 6, 7, 8, 9, 10, 11, 12, 13, 14 or 15. In other embodiments, the linker comprises the sequences (GGGGA)n (SEQ ID NO:137), (PGGGS)n (SEQ ID NO:138), (AGGGS)n (SEQ ID NO:139) or GGS-(EGKSSGSGSESKST)n-GGS (SEQ ID NO:140, wherein n is 2 to 20), (ADAAP)n (SEQ ID NO:545, wherein n is 2 to 20), (ADAAP)n-G (SEQ ID NO:546, wherein n is 2 to 20), (GEPQG)n (SEQ ID NO:547, wherein n is 2 to 20), (GEPQG)n-G (SEQ ID NO:548, wherein n is 2 to 20), (AGGEP)n (SEQ ID NO:549, wherein n is 2 to 20), (AGGEP)n-G (SEQ ID NO:550, wherein n is 2 to 20), (AGSEP)n (SEQ ID NO:551, wherein n is 2 to 20), (AGSEP)n-G (SEQ ID NO:552, wherein n is 2 to 20), (GGGEQ)n (SEQ ID NO:553, wherein n is 2 to 20), (GGGEQ)n-G (SEQ ID NO:554, wherein n is 2 to 20). In some embodiments, the linker is SSSASASSA (SEQ ID NO:141), GSPGSPG (SEQ ID NO:142), ATTTGSSPGPT (SEQ ID NO:143), ADAAPADAAPG (SEQ ID NO:555), GEPQGGEPQGG (SEQ ID NO:556), AGGEPAGGEPG (SEQ ID NO:557), AGSEPAGSEPG (SEQ ID NO:558), or GGGEQGGGEQG (SEQ ID NO:559). In some embodiments, such linkers, by virtue of their structure, may be more resistant to proteolytic degradation, thereby offering an advantage when injected in vivo. In some embodiments, such linkers are negatively charged and may be better suited for dampening the binding of the CD3 binding domain to CD3.

[0444] In some embodiments, the linker is not a cleavable linker, also called non-cleavable linker. In some embodiments, the linker is not a cleavable by a protease. In some embodiments, a linker that is not a cleavable linker or that is not cleavable by a protease is one that is generally stable for in vivo delivery or recombinant production. In some aspects, a linker that is not cleavable by a protease includes those that do not contain at least one peptide bond which preferably lies within a cleavable peptide sequence or recognition site of a protease. In particular embodiments, a non-cleavable linker is not a target substrate for a protease, such that it is not preferentially or specifically cleaved by a protease compared to a linker that contains a substrate recognition site for the same protease.

[0445] In some embodiments, the linker does not contains a substrate recognition site or cleavage site for a particular protease, which is the sequence recognized by the active site of a protease that is cleaved by a protease. Typically, for example, for a serine protease, a cleavage sequence is made up of the P1-P4 and P1′-P4′ amino acids in a substrate, where cleavage occurs after the P1 position. Typically, a cleavage sequence for a serine protease is six residues in length to match the extended substrate specificity of many proteases, but can be longer or shorter depending upon the protease. Typically, the linker does not include a P1-P1′ scissile bond sequence that is recognized by a protease. In some aspects, a non-cleavable linker or a linker that does not contain a substrate recognition site that is specifically recognized for cleavage by a protease is one whose cleavage by a protease is substantially less than cleavage of a target substrate of the protease.

[0446] In some embodiments, the linker is a cleavable linker In some aspects, a cleavable linker is a linker, such as any described above, that further includes a sequence that is a substrate for a protease due to the presence of at least one bond that can be broken under physiological conditions. In some cases, a cleavable linker is susceptible to or sensitive to cleavage under specific conditions that exist in vivo, such as following exposure to an extracellular protease, including those present in cellular environments in vivo. In some cases, the protease may be present in a particular physiological microenvironment, such as the tumor microenvironment, thereby restricting the sites at which cleavage may occur.

[0447] A protease typically exhibits specificity or preference for cleavage of a particular target substrate compared to another non-target substrate. Such a degree of specificity can be determined based on the rate constant of cleavage of a sequence, e.g. linker, which is a measure of preference of a protease for its substrate and the efficiency of the enzyme. Any method to determine the rate of increase of cleavage over time in the presence of various concentrations of substrate can be used to calculate the specificity constant. For example, a substrate is linked to a fluorogenic moiety, which is released upon cleavage by a protease. By determining the rate of cleavage at different protease concentrations the specificity constant for cleavage (k_{cat}/Kₘ) can be determined for a particular protease towards a particular linker. In some embodiments, a cleavable linker is a linker that is capable of being specifically cleaved by a protease at a rate of about at least 1×10⁴ M⁻¹S⁻¹, or at least 5×10⁴ M⁻¹S⁻¹, at least 10×10⁴ M⁻¹S⁻¹. at least 10×10⁵ M⁻¹S⁻¹ or more.

[0448] In some embodiments, a constrained multispecific polypeptide constructs of the disclosure include a cleavable linker that joins the first and second components. In some embodiments, the cleavable linker includes an amino acid sequence that can serve as a substrate for a protease, usually an extracellular protease. For example, the cleavable linker may include a cleavage sequence containing at least one peptide bond which preferably lies within a cleavable peptide sequence of a protease. Suitable proteases include, for example, matrix metalloproteases (MMP), cysteine proteases, serine proteases and plasmin activators, which are formed or activated in intensified manner in diseases such as rheumatoid arthritis or cancer, leading to excessive tissue degradation, inflammations and metastasis. In particular embodiments, the protease is a protease that is produced by a tumor, an activated immune effector cell (e.g. a T cell or a NK cell), or a cell in a tumor microenvironment. In some embodiments, the protease is a granzyme B, a matriptase or an MMP, such as MMP-2.

[0449] The cleavable linker may be selected based on a protease that is produced by a tumor that is in proximity to cells that express the target and/or produced by a tumor that is co-localized in tissue with the desired target of the multispecific polypeptide constructs. There are reports in the literature of increased levels of proteases having known substrates in a number of cancers, e.g., solid tumors. See, e.g., La Rocca et al, (2004) British J. of Cancer 90(7): 1414-1421.

[0450] In some embodiments, the cleavable linker that joins the first and second component of a constrained multispecific polypeptide construct is cleaved by a protease produced by an immune effector cell that is activated by one of the components. For example, multispecific polypeptide constructs that encompass an effector enabled or enhanced IgG Fc region are capable of eliciting ADCC when engaged with the target antigen. Central to ADCC is the release of granzyme B and perforin from the effector cells, namely NK cells and cytotoxic T-cells. Upon release granzyme B enters the target cell in a perforin dependent manner wherein it mediates apoptosis. Importantly, granzyme B is active within the extracellular synapse between the effector cell and the target cell. In some embodiments, the cleavable linker that joins the first and second component multispecific polypeptide construct is cleaved by granzyme B. Granzyme B is released during effector cell activation mediated by one of the components of the multispecific polypeptide construct. In some embodiments, granzyme B and other proteases can be produced by immune effector cells, including activated T cells or NK cells. In some embodiments, activation of T cells by CD3 engagement upon binding of a TAA by a multispecific polypeptide construct may release such proteases, which then can cleave a specific cleavable linker thereby potentiating or increasing activity of the CD3 binding molecule to engage CD3. In some embodiments, the cleavage can amplify or increase the activity achieved by the multispecific construct when bound to TAA in an uncleaved state.

[0451] Exemplary substrates include but are not limited to substrates cleavable by one or more of the following enzymes or proteases: ADAMS, ADAMTS, e.g. ADAM8; ADAM9; ADAM10; ADAM12; ADAM15; ADAM17/TACE; ADAMDEC1; ADAMTS1; ADAMTS4; ADAMTS5; aspartate proteases, e.g., BACE or Renin; aspartic cathepsins, e.g., Cathepsin D or Cathepsin E; Caspases, e.g., Caspase 1, Caspase 2, Caspase 3, Caspase 4, Caspase 5, Caspase 6, Caspase 7, Caspase 8, Caspase 9, Caspase 10, or Caspase 14; cysteine cathepsins, e.g., Cathepsin B, Cathepsin C, Cathepsin K, Cathepsin L, Cathepsin S, Cathepsin V/L2, Cathepsin X/Z/P; Cysteine proteinases, e.g., Cruzipain; Legumain; Otubain-2; KLKs, e.g., KLK4, KLK5, KLK6, KLK7, KLK8, KLK10, KLK11, KLK13, or KLK14; Metallo proteinases, e.g., Meprin; Neprilysin; PSMA; BMP-1; MMPs, e.g., MMP1, MMP2, MMP3, MMP7, MMP8, MMP9, MMP10, MMP11, MMP12, MMP13, MMP14, MMP15, MMP16, MMP17, MMP19, MMP20, MMP23, MMP24, MMP26, or MMP27, serine proteases, e.g., activated protein C, Cathepsin A, Cathepsin G, Chymase, coagulation factor proteases (e.g., FVIIa, FIXa, FXa, FXIa, FXIIa), Elastase, granzyme B, Guanidinobenzoatase, HtrA1, Human Neutrophil Elastase, Lactoferrin, Marapsin, NS3/4A, PACE4, Plasmin, PSA, tPA, Thrombin, Tryptase, uPA; Type II Transmembrane Serine Proteases (TTSPs), e.g., DESC1, DPP-4, FAP, Hepsin, Matriptase-2, Matriptase, TMPRSS2, TMPRSS3, or TMPRSS4; and any combination thereof.

[0452] In some embodiments, the cleavable linker is cleaved by multiple proteases, e.g., 2 or more proteases, 3 or more proteases, 4 or more proteases, and so on.

[0453] In some embodiments, the cleavable linker is selected for use with a specific protease, for example a protease that is known to be produced by a tumor that is in proximity to cells that express the target and/or produced by a tumor that is co-localized with the target of the multispecific polypeptide construct.

[0454] In some embodiments, the cleavable linker contains a substrate recognition site or cleavage site for a particular protease, which is the sequence recognized by the active site of a protease that is cleaved by a protease. Typically, for example, for a serine protease, a cleavage sequence is made up of the P1-P4 and P1′-P4′ amino acids in a substrate, where cleavage occurs after the P1 position. Typically, a cleavage sequence for a serine protease is six residues in length to match the extended substrate specificity of many proteases, but can be longer or shorter depending upon the protease. Typically, the cleavable linker includes a P1-P1′ scissile bond sequence that is recognized by a protease. In some aspects, the cleavable linker is engineered to introduce a peptide bond able to be cleaved by a specific protease, for example by introducing a substrate recognition site sequence or cleavage sequence of the protease.

[0455] In some embodiments, the cleavable linker includes a combination of two or more substrate sequences. In some embodiments, each substrate sequence is cleaved by the same protease. In some embodiments, at least two of the substrate sequences are cleaved by different proteases. In some embodiments, the cleavable linker comprises an amino acid that is a substrate for granzyme B. In some embodiments, a granzyme B cleavable linker contains an amino acid sequence having the general formula P4 P3 P2 P1↓P1′ (SEQ ID NO: 334), wherein P4 is amino acid I, L, Y, M, F, V, or A; P3 is amino acid A, G, S, V, E, D, Q, N, or Y; P2 is amino acid H, P, A, V, G, S, or T; P1 is amino acid D or E; and P1′ is amino acid I, L, Y, M, F, V, T, S, G or A. In some embodiments, a granzyme B cleavable linker contains an amino acid sequence having the general formula P4 P3 P2 P1 ↓ P1′ (SEQ ID NO: 335), wherein P4 is amino acid I or L; P3 is amino acid E; P2 is amino acid P or A; P1 is amino acid D; and P1′ is amino acid I, V, T, S, or G.

[0456] In some embodiments, the substrate for granzyme B comprises the amino acid sequence LEAD (SEQ ID NO: 336), LEPD (SEQ ID NO: 337), or LEAE (SEQ ID NO:338). In some embodiments, the cleavable linker contains the amino acid sequence the cleavable linker comprises the amino acid sequence IEPDI (SEQ ID NO:339), LEPDG (SEQ ID NO:340), LEADT (SEQ ID NO:341), IEPDG (SEQ ID NO:342), IEPDV (SEQ ID NO:343), IEPDS (SEQ ID NO:344), IEPDT (SEQ ID NO:345), IEPDP (SEQ ID NO:482), LEPDG (SEQ ID NO:340) or LEADG (SEQ ID NO:334).

[0457] In some embodiments, the cleavable linker comprises an amino acid that is a substrate for matriptase. In some embodiments, the cleavable linker comprises the sequence P1QAR↓(A/V) (SEQ ID NO: 346), wherein P1 is any amino acid. In some embodiments, the cleavable linker comprises the sequence RQAR(A/V) (SEQ ID NO: 347). In some embodiments, the substrate for matriptase comprises the amino acid sequence RQAR (SEQ ID NO: 348). In some embodiments, the cleavable linker comprises the amino acid sequence RQARV (SEQ ID NO: 349).

[0458] In some embodiments, the cleavable linker comprises an amino acid that is a substrate for one or more matrix metalloproteases (MMPs). In some embodiments, the MMP is MMP-2. In some embodiments, the cleavable linker contains. the general formula P3 P2 P1↓P1′ (SEQ ID NO: 350), wherein P3 is P, V or A; P2 is Q or D; P1 is A or N; and P1′ is L, I or M. In some embodiments, the cleavable linker contains the general formula P3 P2 P1 ↓ P1′ (SEQ ID NO: 351), wherein P3 is P; P2 is Q or D; P1 is A or N; and P1′ is L or I. In some embodiments, the substrate for MMP comprises the amino acid sequence PAGL (SEQ ID NO: 352).

[0459] In some embodiments, the cleavable linker comprises a combination of an amino acid sequence that is a substrate for granzyme B and an amino acid sequence that is a substrate for matriptase. In some embodiments, the cleavable linker comprises a combination of the amino acid sequence LEAD (SEQ ID NO: 336) and the amino acid sequence RQAR (SEQ ID NO: 348).

[0460] In some embodiments, the cleavable linker comprises a combination of an amino acid sequence that is a substrate for granzyme B and an amino acid sequence that is a substrate for MMP. In some embodiments, the cleavable linker comprises a combination of the amino acid sequence LEAD (SEQ ID NO: 336) and the amino acid sequence PAGL (SEQ ID NO: 352).

[0461] In some embodiments, the cleavable linker comprises a combination of an amino acid sequence that is a substrate for matriptase and an amino acid sequence that is a substrate for MMP. In some embodiments, the cleavable linker comprises a combination of the amino acid sequence RQAR (SEQ ID NO: 348) and the amino acid sequence PAGL (SEQ ID NO: 352).

[0462] In some embodiments, the cleavable linker comprises a combination of an amino acid sequence that is a substrate for granzyme B, an amino acid sequence that is a substrate for matriptase, and an amino acid sequence that is a substrate for MMP. In some embodiments, the cleavable linker comprises a combination of an amino acid sequence that is a substrate for granzyme B and an amino acid sequence that is a substrate for MMP. In some embodiments, the cleavable linker comprises a combination of the amino acid sequence LEAD (SEQ ID NO: 336), the amino acid sequence RQAR (SEQ ID NO: 348), and the amino acid sequence PAGL (SEQ ID NO: 352).

[0463] The cleavable linker can include any known linkers. Examples of cleavable linkers are described in Be'liveau et al. (2009) FEBS Journal, 276; U.S. published application Nos. US20160194399; US20150079088; US20170204139; US20160289324; US20160122425; US20150087810; US20170081397; U.S. Pat. No. 9,644,016.

[0464] In some embodiments, the cleavable linker comprises an amino acid sequence selected from the group consisting of TGLEADGSPAGLGRQARVG (SEQ ID NO: 353); TGLEADGSRQARVGPAGLG (SEQ ID NO: 354); TGSPAGLEADGSRQARVGS (SEQ ID NO: 355); TGPAGLGLEADGSRQARVG (SEQ ID NO: 356); TGRQARVGLEADGSPAGLG (SEQ ID NO: 357); TGSRQARVGPAGLEADGS (SEQ ID NO: 358); and TGPAGLGSRQARVGLEADGS (SEQ ID NO: 359); GPAGLGLEPDGSRQARVG (SEQ ID NO: 360); GGSGGGGIEPDIGGSGGS (SEQ ID NO: 361); GGSGGGGLEADTGGSGGS (SEQ ID NO: 362); GSIEPDIGS (SEQ ID NO: 363); GSLEADTGS (SEQ ID NO: 364); GGSGGGGIEPDGGGSGGS (SEQ ID NO: 365); GGSGGGGIEPDVGGSGGS (SEQ ID NO: 366); GGSGGGGIEPDSGGSGGS (SEQ ID NO: 367); GGSGGGGIEPDTGGSGGS (SEQ ID NO: 368); GGGSLEPDGSGS (SEQ ID NO: 369); GPAGLGLEADGSRQARVG (SEQ ID NO: 370), GGEGGGGSGGSGGGS (SEQ ID NO: 371); GSSAGSEAGGSGQAGVGS (SEQ ID NO: 372); GGSGGGGLEAEGSGGGGS (SEQ ID NO: 373); GGSGGGGIEPDPGGSGGS(SEQ ID NO: 374); TGGSGGGGIEPDIGGSGGS (SEQ ID NO: 375).

[0465] e. Costimulatory Binding Domain

[0466] Multispecific polypeptide constructs of the present disclosure include one or more co-stimulatory receptor binding region (CRBR) that binds a costimulatory receptor. In some embodiments, the one or more CRBR of the provided multispecific polypeptide constructs bind a co-stimulatory receptor expressed on T cells. In some embodiments, the co-stimulatory receptor is upregulated, induced, or expressed on the surface of an activated T cell. In some aspects, the CRBR binds a co-stimulatory receptor and stimulates the co-stimulatory receptor. In some embodiments, agonistic binding of the co-stimulatory receptor to the CRBR of the multispecific polypeptide induces downstream signaling in the T cell to potentiate or enhance T cell activation or functionalities following engagement of CD3. In some embodiments, the CRBR, or independently each of the CRBRs, is an antibody or antigen binding fragment, a natural cognate binding partner of the co-stimulatory receptor, an Anticalin (engineered lipocalin), a Darpin, a Fynomer, a Centyrin (engineered fibroneticin III domain), a cystine-knot domain, an Affilin, an Affibody, or an engineered CH3 domain.

[0467] In some embodiments, the CRBR, or independently each of the CRBRs, such as the first CRBR and the second CRBRs, includes one or more copies of an antibody or an antigen-binding fragment thereof. In some embodiments, the CRBR or independently each of the CRBRs, such as the first antigen-binding domain and the second CRBRs, includes one or more copies of an antibody or an antigen-binding fragment thereof selected from the group consisting of a Fab fragment, a F(ab′)₂ fragment, an Fv fragment, a scFv, a scAb, a dAb, a single domain heavy chain antibody, and a single domain light chain antibody.

[0468] In some embodiments, the CRBR, or independently each of the CRBRs, such as the first CRBR and the second CRBRs, is a single chain antibody. In some examples, the single chain is an scFv, a scAb, a single domain heavy chain antibody, or a single domain light chain antibody.

[0469] In some embodiments, the CRBR, or independently each of the CRBRs, such as the first CRBR and the second CRBR, includes one or more single domain antibody (sdAb) fragments, for example V_{H}H, V_{NAR}, engineered V_{H} or V_{K} domains. V_{H}Hs can be generated from natural camelid heavy chain only antibodies, genetically modified rodents that produce heavy chain only antibodies, or naive/synthetic camelid or humanized camelid single domain antibody libraries. V_{NAR}_{^{S}} can be generated from cartilaginous fish heavy chain only antibodies. Various methods have been implemented to generate monomeric sdAbs from conventionally heterodimeric V_{H} and V_{K} domains, including interface engineering and selection of specific germline families.

[0470] In some embodiments, the CRBR, or independently each of the CRBRs such as the first CRBR and/or the second CRBR, of the multispecific polypeptide constructs contains at least one sdAb or an scFv that binds a costimulatory receptor. In some embodiments, the at least one scFv or sdAb that binds a costimulatory receptor is positioned amino-terminally relative to the Fc region and/or carboxy-terminally relative to the CD3 binding region of the multispecific polypeptide construct. In some embodiments, the multispecific polypeptide construct contains only one scFv or sdAb that binds to a costimulatory receptor, which can be positioned either amino-terminally relative to the Fc region and/or carboxy-terminally relative to the CD3 binding region. In some embodiments, the multispecific polypeptide construct contains two scFv or sdAb that bind to a costimulatory receptor, positioned amino-terminally relative to the Fc region and/or carboxy-terminally relative to the CD3 binding region.

[0471] In some embodiments, the multispecific polypeptide construct is formed from or includes two polypeptides, including a first polypeptide comprising a first Fc polypeptide of a heterodimeric Fc region, a linker, a VH domain of an anti-CD3 antibody or antigen binding fragment (e.g. Fv), and an scFv or sdAb that binds to a costimulatory receptor; and a second polypeptide comprising a second Fc polypeptide of the heterodimeric Fc region, the linker, a VL domain of the anti-CD3 antibody or antigen binding fragment (e.g. Fv) and, optionally, another, the same or different, scFv or sdAb that binds to a costimulatory receptor. The scFv or sdAb that binds the costimulatory receptor can be positioned amino terminally relative to an Fc polypeptide of the heterodimeric Fc and/or carboxy-terminally relative to a VH or VL chain of the CD3 binding region. At least one of the first and/or second polypeptide of the multispecific polypeptide construct also includes an antigen binding domain that binds a TAA or a chain thereof as described in Section II.4. In some embodiments, the antigen binding domain that binds a TAA is a scFv or sdAb and is included as part of the first and/or second polypeptide of the multispecific polypeptide construct. In some embodiments, the antigen binding domain that binds a TAA is a Fab, and the multispecific polypeptide construct is additionally formed from a third polypeptide where at least the first and second polypeptide include a chain of the Fab that binds TAA (e.g. VH-CH1 or VL-CL of a Fab) and the third polypeptide contains the other chain of the Fab that binds TAA (e.g. the other of VH-CH1 or VL-CL of a Fab).

[0472] In some embodiments, the CRBR or independently each of the CRBRs, such as the first CRBR and/or the second CRBRs, contains more than one chain. In some embodiments, the CRBR or independently each of the CRBRs, such as the first CRBR and/or the second CRBRs, of the multispecific polypeptide constructs contains VH and VL sequences assembled as FABs.

[0473] In some embodiments, the CRBR antigen binding domain or independently each of the CRBR antigen binding domains, such as the first antigen-binding domain and/or the second antigen binding domains, of the multispecific polypeptide constructs contains a VH-CH1 (Fd) and a VL-CL of a Fab antibody that binds a costimulatory receptor. In some embodiments, the Fab antibody containing a VH-CH1 (Fd) and a VL-CL is positioned amino-terminally relative to the Fc region and/or carboxy-terminally relative to the CD3 binding region of the multispecific polypeptide construct. In some embodiments, the multispecific polypeptide construct contains only one Fab antibody, containing a VH-CH1 (Fd) or VL-CL, that binds to a costimulatory receptor, which can be positioned either amino-terminally relative to the Fc region and/or carboxy-terminally relative to the CD3 binding region. In some embodiments, the multispecific polypeptide construct contains two Fab antibody fragments, each containing a VH-CH1 (Fd) and VL-CL, that binds to a costimulatory receptor, in which one is positioned amino-terminally relative to the Fc region and the other is positioned carboxy-terminally relative to the CD3 binding region.

[0474] In some embodiments, the multispecific polypeptide construct is formed from or includes three or more polypeptides, including a first polypeptide comprising a first Fc polypeptide of a heterodimeric Fc region, a linker and a VH-CH1 (Fd) or VL-CL of a Fab antibody fragment that binds to a costimulatory receptor; a second polypeptide comprising a second Fc polypeptide of the heterodimeric Fc region, the linker and, optionally, the same VH-CH1 (Fd) or VL-CL of the Fab antibody fragment that binds to a costimulatory receptor, and a third polypeptide comprising the other of the VH-CH1 (Fd) or VL-CL of the Fab antibody fragment that binds to the costimulatory receptor. The first, second and/or third polypeptide of the multispecific polypeptide construct also can include a B7H3 VHH domain, such as any as described.

[0475] In some embodiments, the CRBR, or independently each of the CRBRs, is or includes a natural (native) cognate binding partner of the co-stimulatory receptor (e.g. a natural ligand), or a variant thereof that exhibits binding activity to the co-stimulatory receptor.

[0476] In some embodiments, the one or more CRBR of the provided multispecific polypeptide constructs bind a co-stimulatory receptor expressed on T cells. In some embodiments, there are more than one CRBR that binds to a costimulatory receptor and each of the CRBRs, such as the first CRBR and the second CRBR, bind the same co-stimulatory receptor. In some embodiments, each of the CRBRs, such as the first CRBR and the CRBRs, bind a different co-stimulatory receptor. In some embodiments, each of the CRBRs, such as the first CRBR and the second CRBR bind a different epitope on the same co-stimulatory receptor. In some embodiments, each of the CRBRs, such as the first antigen-CRBR and the CRBR, bind the same epitope on the same co-stimulatory receptor.

[0477] In some embodiments, the CRBR, or independently each of the CRBRs that binds a co-stimulatory receptor results in monovalent, bivalent, trivalent, or tetravalent binding to the co-stimulatory receptor.

[0478] In some embodiments, the antigen binding domains results in monovalent, bivalent, trivalent, or tetravalent binding to the TAA. In some embodiments, bivalent binding to the TAA comprises two antigen binding domains that bind the same epitope of the same antigen (e.g. mono-epitopic). In some embodiments, bivalent binding to the TAA comprises two antigen binding domains that bind different epitopes of the same antigen (e.g. bi-epitopic). In some embodiments, monovalent binding to the TAA comprises one antigen binding domain that binds one epitope of the antigen (e.g.mono-epitopic).

[0479] In some embodiments, the co-stimulatory receptor is expressed on T cells, such as primary T cells obtained from a subject. In some embodiments, the co-stimulatory receptor is expressed on human T cells, such as primary human T cells obtained from a human subject.

[0480] In some embodiments, the co-stimulatory receptor is a member of the tumor necrosis factor (TNF) receptor family. In some embodiments, the costimulatory receptor is a member of the immunoglobulin superfamily (IgSF). In some embodiments, the costimulatory receptor is a member of the B7 family of receptors.

[0481] In some embodiments, the co-stimulatory receptor is selected from the group consisting of 41BB (CD137), OX40 (CD134), CD27, glucocorticoid-induced TNFR-related protein (GITR), CD28, ICOS, CD40, B-cell activating factor receptor (BAFF-R), B-cell maturation antigen (BCMA), Transmembrane activator and CAML interactor (TACI), and NKG2D. In some embodiments, the co-stimulatory receptor is selected from 41BB, OX40, GITR, ICOS, or CD28. In some embodiments, the co-stimulatory receptor is selected from 41BB, OX40, or GITR.

[0482] In some embodiments, the costimulatory receptor is 41BB. In some embodiments, the costimulatory receptor is OX40. In some embodiments, the costimulatory receptor is GITR. In some embodiments, the costimulatory receptor is ICOS. In some embodiments, the costimulatory receptor is CD28.

[0483] In some embodiments, the CRBR of the multispecific polypeptide is or comprises an agonistic binding molecule to the co-stimulatory receptor. The CRBR can bind to the co-stimulatory receptor and initiate, induce, or stimulate a reaction or activity that is similar to or the same as that initiated, induced, or stimulated by the receptor's natural ligand. In some aspects, the binding of the CRBR to the co-stimulatory receptor induces or stimulates a downstream signal that is more than 5%, more than 10%, more than 20%, more than 30%, more than 40%, more than 50%, more than 60%, more than 70%, more than 80%, more than 90%, or more than 100% of the signal that is initiated, induced, or stimulated by the receptor's natural ligand.

[0484] In some embodiments, the one or more CRBR is an antibody or fragment thereof that binds to the co-stimulatory receptor 41BB (CD137), OX40 (CD134), CD27, glucocorticoid-induced TNFR-related protein (GITR), CD28, ICOS, CD40, B-cell activating factor receptor (BAFF-R), B-cell maturation antigen (BCMA). In some embodiments, the one or more CRBR is an antibody or fragment thereof that binds to the co-stimulatory receptor 41BB, OX40, GITR, ICOS, or CD28. In some embodiments, the one or more CRBR is an antibody or fragment thereof that binds to the co-stimulatory receptor 41BB, OX40, or GITR. Exemplary polypeptides for binding 41BB, OX40 and GITR are described in PCT publication. No. WO2017123650, WO2017123673, and WO2017015623, respectively. In some embodiments, the one or more CRBR is a single domain antibody (sdAb) that binds the co-stimulatory receptor, such as those described in PCT publication. No. WO2017123650, WO2017123673, and WO2017015623.

[0485] In some examples, the co-stimulatory receptor binding region (CRBR) binds or comprises a natural cognate binding partner of 41BB (CD137), OX40 (CD134), CD27, glucocorticoid-induced TNFR-related protein (GITR), CD28, ICOS, CD40, B-cell activating factor receptor (BAFF-R), B-cell maturation antigen (BCMA), Transmembrane activator and CAML interactor (TACI), NKG2D. In some embodiments, the natural cognate binding partner is selected from 41BB ligand (41BBL), OX40L (CD252), CD70, GITR Ligand/TNFSF18, CD80 (B7-1), CD86 (B7-2), ICOS Ligand (ICOSL), CD154 (CD40L), B-cell activating factor (BAFF), A proliferation-inducing ligand (APRIL), NKG2D ligands, or a functional fragment thereof.

[0486] In some embodiments, the co-stimulatory receptor binding region (CRBR) is an antibody or antigen binding fragment that binds 41BB. In particular examples, the CRBR that binds 4-1BB is a single domain antibody. In some embodiments, the sdAb contains a CDR1 GFSFSINAMG (set forth in SEQ ID NO:468), a CDR2 AIESGRNTV (set forth in SEQ ID NO:469) and a CDR3 LKGNRVVSPSVAY (set forth in SEQ ID NO: 470). Examples of sdAb that target 41BB are described in PCT publication. No. WO2017123650.

[0487] Exemplary sequences of CRBRs are set forth in Table 4.

[0488] In some embodiments, at least one CRBR, or independently each CRBR, binds the co-stimulatory receptor 41BB. In some examples, the CRBR is or contains an antibody or antigen binding fragment specific to or that binds 41BB, such as a sdAb or fragments containing a VH and VL (e.g. scFv). In some embodiments, at least on CRBR, or independently each CRBR, is a natural ligand of 41BB or is a functional binding fragment thereof. Exemplary 41BB-binding CRBRs are set forth in any of SEQ ID NOS: 376-400 and 481. In some emobidments, a 41BB-binding CRBR is a functional fragment of 41BB ligand (41BBL) containing the extracellular domain or a truncated portion thereof, such as corresponding to amino acids 50-254 of UniProt No. P41273, e.g. as set forth in SEQ ID NO:376, or a truncated portion or fragment thereof set forth in any of SEQ ID NOS:392-399. In some embodiments, at least one CRBR, or independently each CRBR, is an anticalin set forth in any one of SEQ ID NOS: 383-391. In some embodiments, a sdAb, such as a VHH, contains a CDR1, a CDR2, and a CDR3 having a sequence set forth in SEQ ID NO: 468, 469, and 470, respectively. A 41BB-binding CRBR, such as a sdAb, can include the sequence set forth in SEQ ID NO:400. A 41BB-binding CRBR, such as a sdAb, can include the sequence set forth in SEQ ID NO:481. In some embodiments, the 4-1BB-binding domain contains an antigen binding antibody fragment containing a VH and a VL, such as a single chain fragment in which the VH and VL are separated by a linker, for example an scFv. In some embodiments, the 41BB binding CRBR contains a VH set forth in any of SEQ ID NOS: 377, 379 and 381 and a VL set forth in any of SEQ ID NO: 378, 380 or 382. The CRBRs, or independently each CRBR, in a provided multispecific polypeptide construct can have at least 85%, 85%, 87%, 88%, 89%, 90%, 91%, 92%, 93%, 94%, 95%, 96%, 97%, 98% or 99% sequence identity to any of the foregoing SEQ ID Nos and bind 41BB.

[0489] In some embodiments, at least one CRBR, or independently each CRBR, binds the co-stimulatory receptor OX40. In some examples, the CRBR is or contains an antibody or antigen binding fragment specific to or that binds OX40, such as a sdAb or fragments containing a VH and VL (e.g. scFv). In some embodiments, at least on CRBR, or independently each CRBR, is a natural ligand of OX40 or is a functional binding fragment thereof. Exemplary of such OX40-binding CRBRs are set forth in any of SEQ ID NOS: 401-410. In some embodiments, the OX40-binding CRBR contains an VH set forth in any of SEQ ID NOS: 406 and 408 and a VL set forth in any of SEQ ID NO: 407 and 409. The CRBRs, or independently each CRBR, in a provided multispecific polypeptide construct can have at least 85%, 85%, 87%, 88%, 89%, 90%, 91%, 92%, 93%, 94%, 95%, 96%, 97%, 98% or 99% sequence identity to any of the foregoing SEQ ID Nos and bind OX40.

[0490] In some embodiments, at least one CRBR, or independently each CRBR, binds the co-stimulatory receptor GITR. In some examples, the CRBR is or contains an antibody or antigen binding fragment specific to or that binds GITR, such as a sdAb or fragments containing a VH and VL (e.g. scFv). In some embodiments, at least one CRBR, or independently each CRBR, is a natural ligand of GITR or is a functional binding fragment thereof. Exemplary of such GITR-binding CRBRs are set forth in any of SEQ ID NOS: 411-416. In some embodiments, the GITR binding CRBR contains a VH set forth in any of SEQ ID NOS: 412, 414, 289 and 291 and a VL set forth in any of SEQ ID NO: 413, 415, 290, 292. The CRBRs, or independently each CRBR, in a provided multispecific polypeptide construct can have at least 85%, 85%, 87%, 88%, 89%, 90%, 91%, 92%, 93%, 94%, 95%, 96%, 97%, 98% or 99% sequence identity to any of the foregoing SEQ ID Nos and bind GITR.

[0491] In some embodiments, at least one CRBR, or independently each CRBR, binds the co-stimulatory receptor CD27. In some examples, the CRBR is or contains an antibody or antigen binding fragment specific to or that binds CD27, such as a sdAb or fragments containing a VH and VL (e.g. scFv). In some embodiments, at least one CRBR, or independently each CRBR, is a natural ligand of CD27 or is a functional binding fragment thereof. Exemplary of such CD27-binding CRBRs are set forth in any of SEQ ID NOS: 276-278. In some embodiments, the CD27 binding CRBR contains a VH set forth SEQ ID NO: 277 and a VL set forth in SEQ ID NO: 278. The CRBRs, or independently each CRBR, in a provided multispecific polypeptide construct can have at least 85%, 85%, 87%, 88%, 89%, 90%, 91%, 92%, 93%, 94%, 95%, 96%, 97%, 98% or 99% sequence identity to any of the foregoing SEQ ID Nos and bind CD27.

[0492] In some embodiments, at least one CRBR, or independently each CRBR, binds the co-stimulatory receptor ICOS. In some examples, the CRBR is or contains an antibody or antigen binding fragment specific to or that binds ICOS, such as a sdAb or fragments containing a VH and VL (e.g. scFv). In some embodiments, at least one CRBR, or independently each CRBR, is a natural ligand of ICOS or is a functional binding fragment thereof. An exemplary ICOS-binding CRBR sequence is set forth in SEQ ID NO: 279.

[0493] In some embodiments, at least one CRBR, or independently each CRBR, binds the co-stimulatory receptor CD28. In some examples, the CRBR is or contains an antibody or antigen binding fragment specific to or that binds CD28, such as a sdAb or fragments containing a VH and VL (e.g. scFv). In some embodiments, at least one CRBR, or independently each CRBR, is a natural ligand of CD28 or is a functional binding fragment thereof. An exemplary CD28-binding CRBR sequence is set forth in SEQ ID NO: 280.

TABLE 4
Exemplary CRBR Sequences

| | | | |
|---|---|---|---|
| CRBR | Format | Reference | SEQ ID NO |

41BB binding CRBR Sequences

| | | | |
|---|---|---|---|
| 41BBL | Natural Ligand | UniProt accession no. P41273 | 376 |
| PF-05082566 | VH | US 2012/0237498 (SEQ ID NO: 43) | 377 |
| | VL | US 2012/0237498 (SEQ ID NO: 45) | 378 |
| BMS663513 | VH | WO 2005/035584 (SEQ ID NO: 9) | 379 |
| | VL | WO 2005/035584 (SEQ ID NO: 6) | 380 |
| MSB7 | VH | US 2017/0226215 (SEQ ID NO: 138) | 381 |
| | VL | US 2017/0226215 (SEQ ID NO: 28) | 382 |
| 41BB Anticalin | Anticalin | WO 2016/177762 (SEQ ID NO: 12) | 383 |
| 41BB Anticalin | Anticalin | WO 2016/177762 (SEQ ID NO: 13) | 384 |
| 41BB Anticalin | Anticalin | WO 2016/177762 (SEQ ID NO: 14) | 385 |
| 41BB Anticalin | Anticalin | WO 2016/177762 (SEQ ID NO: 15) | 386 |
| 41BB Anticalin | Anticalin | WO 2016/177762 (SEQ ID NO: 16) | 387 |
| 41BB Anticalin | Anticalin | WO 2016/177762 (SEQ ID NO: 17) | 388 |
| 41BB Anticalin | Anticalin | WO 2016/177762 (SEQ ID NO: 18) | 389 |
| 41BB Anticalin | Anticalin | WO 2016/177762 SEQ ID NO: 19) | 390 |
| 41BB Anticalin | Anticalin | WO 2016/177762 (SEQ ID NO: 20) | 391 |
| 71-254 of human | 41BB ligand | WO 2017/167672 (SEQ ID NO: 3) | 392 |
| 41BBL | | | |
| 85-254 of human | 41BB ligand | WO 2017/167672 (SEQ ID NO: 4) | 393 |
| 41BBL | | | |
| 80-254 of human | 41BB ligand | WO 2017/167672 (SEQ ID NO: 5) | 394 |
| 41BBL | | | |
| 52-254 of human | 41BB ligand | WO 2017/167672 (SEQ ID NO: 6) | 395 |
| 41BBL | | | |
| 71-248 of human | 41BB ligand | WO 2017/167672 (SEQ ID NO: 7) | 396 |
| 41BBL | | | |
| 85-248 of human | 41BB ligand | WO 2017/167672 (SEQ ID NO: 8 | 397 |
| 41BBL | | | |
| 80-248 of human | 41BB ligand | WO 2017/167672 (SEQ ID NO: 9) | 398 |
| 41BBL | | | |
| 52-248 of human | 41BB ligand | WO 2017/167672 (SEQ ID NO: 10) | 399 |
| 41BBL | | | |
| 41BB sdAb | sdAb | US 2017/0198050 | 400 |
| 41BB sdAb | sdAb | | 481 |

OX40-binding CRBR Sequences

| | | | |
|---|---|---|---|
| OX40 ligand | Natural Ligand | UniProt accession no. P23510 | 401 |
| OX40 ligand | Natural Ligand | U.S. Pat. No. 7,959,925 (SEQ ID NO: 2) | 402 |
| human OX40L: | Natural Ligand | WO 2017/167672 (SEQ ID NO: 11) | 403 |
| 51-183 | | | |
| Human OX40L: | Natural Ligand | WO 2017/167672 (SEQ ID NO: 12) | 404 |
| 51-183 N90D | | | |
| Human OX40L: | Natural Ligand | WO 2017/167672 (SEQ ID NO :13) | 405 |
| 52-183 | | | |
| 1A07 | VH | US 2015/0307617 (SEQ ID NO: 56) | 406 |
| | VL | US 2015/0307617 (SEQ ID NO: 59) | 407 |
| 1949 | VH | WO 2016/179517 (SEQ ID NO: 16) | 408 |
| | VL | WO 2016/179517 | 409 |
| ID10v1 | sdAb | U.S. Pat. No, 9,006,399 | 410 |

GITR-binding CRBR Sequences

| | | | |
|---|---|---|---|
| GITR ligand | Natural Ligand | UniProt no. Q9UNG2 | 411 |
| 36E5 | VH | US 2014/0348841 (SEQ ID NO: 104) | 412 |
| | VL | US 2014/0348841 (SEQ ID NO: 105) | 413 |
| TRX-518 | VH | US 2013/0183321 (SEQ ID NO: 54) | 414 |
| | VL | US 2013/0183321 (SEQ ID NO: 44) | 415 |
| 5H7v2 | VH | US 2015/0064204 (SEQ ID NO: 282) | 289 |
| | VL | US 2015/0064204 (SEQ ID NO: 134) | 290 |
| 41G5v2 | VH | US 2015/0064204 (SEQ ID NO: 312) | 291 |
| | VL | US 2015/0064204 (SEQ ID NO: 124) | 292 |
| C06v3 | sdAb | US 2017/0022284 (SEQ ID NO: 59) | 416 |

CD27-binding CRBR Sequences

| | | | |
|---|---|---|---|
| CD70-ECD | Natural Ligand | UniProt no. P32970 | 276 |
| 1F5 | VH | US 2011/0274685 | 277 |
| | VL | US 2011/0274685 | 278 |

CD28-binding CRBR Sequences

| | | |
|---|---|---|
| CD28 sdAb | sdAb | 280 |

ICOS-binding CRBR Sequences

| | | |
|---|---|---|
| ICOS sdAb | sdAb | 279 |

[0494] In some embodiments, the one or more CRBR is linked, directly or indirectly via a linker, to the Fc region and/or to the CD3 binding region. In some embodiments, linkage is via a linker. In some embodiments, the linker is a linking peptide (LP), which can include any flexible or rigid linker as described herein, although generally the peptide linking the CRBR or regions is not a cleavable liker.

[0495] In some embodiments, the multispecific polypeptide construct comprises a linking peptide (LP) between the CRBR and the Fc region. In some embodiments, the multispecific polypeptide construct comprises a linking peptide (LP) between the CD3 binding region and the CRBR.

f. Inhibitory Receptor Binding Regions (IRBR)

[0496] The multispecific polypeptide constructs of the present disclosure include one or more inhibitor receptor binding region (IRBR) that binds an inhibitory receptor. In some embodiments, the one or more IRBR of the provided multispecific polypeptide constructs binds an inhibitory receptor expressed on T cells. In some embodiments, the inhibitory receptor is upregulated, induced, or expressed on the surface of an activated T cell. In some aspects, the IRBR blocks an interaction between the inhibitory receptor and its ligand, thereby reducing, suppressing or decreasing an inhibitory signal in the cell to which the IRBR binds, e.g. T cell. In some embodiments, the IRBR, or independently each of the IRBRs, is an antibody or antigen binding fragment, a natural cognate binding partner of the co-stimulatory receptor, an Anticalin (engineered lipocalin), a Darpin, a Fynomer, a Centyrin (engineered fibroneticin III domain), a cystine-knot domain, an Affilin, an Affibody, or an engineered CH3 domain.

[0497] In some embodiments, the IRBR, or independently each of the IRBRs, such as the first IRBR and the second IRBR, includes one or more copies of an antibody or an antigen-binding fragment thereof. In some embodiments, the IRBR or independently each of the IRBRs, such as the first IRBR and the second IRBR, includes one or more copies of an antibody or an antigen-binding fragment thereof selected from the group consisting of a Fab fragment, a F(ab′)₂ fragment, an Fv fragment, a scFv, a scAb, a dAb, a single domain heavy chain antibody, and a single domain light chain antibody.

[0498] In some embodiments, the IRBR, or independently each of the IRBRs, such as the first IRBR and the second IRBR, is a single chain antibody. In some examples, the single chain is an scFv, a scAb, a single domain heavy chain antibody, or a single domain light chain antibody.

[0499] In some embodiments, the IRBR, or independently each of the IRBRs, such as the first IRBR and the second IRBR, includes one or more single domain antibody (sdAb) fragments, for example V_{H}H, V_{NAR}, engineered V_{H} or V_{K} domains. V_{H}Hs can be generated from natural camelid heavy chain only antibodies, genetically modified rodents that produce heavy chain only antibodies, or naive/synthetic camelid or humanized camelid single domain antibody libraries. V_{NAR}_{^{S}} can be generated from cartilaginous fish heavy chain only antibodies. Various methods have been implemented to generate monomeric sdAbs from conventionally heterodimeric V_{H} and V_{K} domains, including interface engineering and selection of specific germline families.

[0500] In some embodiments, the IRBR, or independently each of the IRBRs such as the first IRBR and/or the second IRBR, of the multispecific polypeptide constructs contains at least one sdAb or an scFv that binds an inhibitory receptor. In some embodiments, the at least one scFv or sdAb that binds an inhibitory receptor is positioned amino-terminally relative to the Fc region and/or carboxy-terminally relative to the CD3 binding region of the multispecific polypeptide construct. In some embodiments, the multispecific polypeptide construct contains only one scFv or sdAb that binds to an inhibitory receptor, which can be positioned either amino-terminally relative to the Fc region and/or carboxy-terminally relative to the CD3 binding region. In some embodiments, the multispecific polypeptide construct contains two scFv or sdAb that bind to an inhibitory receptor, positioned amino-terminally relative to the Fc region and/or carboxy-terminally relative to the CD3 binding region.

[0501] In some embodiments, the multispecific polypeptide construct is formed from or includes two polypeptides, including a first polypeptide comprising a first Fc polypeptide of a heterodimeric Fc region, a linker, a VH domain of an anti-CD3 antibody or antigen binding fragment (e.g. Fv), and an scFv or sdAb that binds to an inhibitory receptor; and a second polypeptide comprising a second Fc polypeptide of the heterodimeric Fc region, the linker, a VL domain of the anti-CD3 antibody or antigen binding fragment (e.g. Fv) and, optionally, another, the same or different, scFv or sdAb that binds to an inhibitory receptor. The scFv or sdAb that binds the inhibitory receptor can be positioned amino terminally relative to an Fc polypeptide of the heterodimeric Fc and/or carboxy-terminally relative to a VH or VL chain of the CD3 binding region. At least one of the first and/or second polypeptide of the multispecific polypeptide construct also includes an antigen binding domain that binds a TAA or a chain thereof as described in Section II.4. In some embodiments, the antigen binding domain that binds a TAA is a scFv or sdAb and is included as part of the first and/or second polypeptide of the multispecific polypeptide construct. In some embodiments, the antigen binding domain that binds a TAA is a Fab, and the multispecific polypeptide construct is additionally formed from a third polypeptide where at least the first and second polypeptide include a chain of the Fab that binds TAA (e.g. VH-CH1 or VL-CL of a Fab) and the third polypeptide contains the other chain of the Fab that binds TAA (e.g. the other of VH-CH1 or VL-CL of a Fab).

[0502] In some embodiments, the multispecific polypeptide construct is formed from or includes two polypeptides, including a first polypeptide comprising in order: a first antigen binding domain specific for a TAA, a first Fc polypeptide of a heterodimeric Fc region, a linker, a VH domain of an anti-CD3 antibody or antigen binding fragment (e.g. Fv), and a second antigen binding domain specific for a TAA; and a second polypeptide containing the IRBR and comprising in order: a second Fc polypeptide of the heterodimeric Fc region, the linker, a VL domain of the anti-CD3 antibody or antigen binding fragment (e.g. Fv) , wherein the IRBR is positioned amino terminally to the Fc region and/or C-terminally to the CD3 binding region. In some embodiments, the IRBR is positioned on the second polypeptide carboxy-terminally to the CD3 binding region. In some embodiments, the IRBR is positioned on the second polypeptide amino-terminally to the Fc region. In some embodiments, the IRBR is positioned amino terminally to the Fc region and C-terminally to the CD3 binding region. In some embodiments, the first and second antigen binding domain is specific to a TAA are the same. In some embodiments, the first and second antigen binding domain is specific to a TAA are different. In some embodiments, the first antigen binding domain and the second antigen binding domain bind a different TAA. In some embodiments, the first antigen binding domain and the second antigen binding domain bind a distinct or non-overlapping epitope of the same TAA and/or compete for binding to the same TAA.

[0503] In some embodiments, the IRBR or independently each of the IRBRs, such as the first IRBR and/or the second IRBR, contains more than one chain. In some embodiments, the IRBR or independently each of the IRBRs, such as the first IRBR and/or the second IRBR, of the multispecific polypeptide constructs contains VH and VL sequences assembled as FABs.

[0504] In some embodiments, the antigen binding domain or independently each of the antigen binding domains, such as the first antigen-binding domain and/or the second antigen binding domains, of the multispecific polypeptide constructs contains a VH-CH1 (Fd) and a VL-CL of a Fab antibody that binds an inhibitory receptor. In some embodiments, the Fab antibody containing a VH-CH1 (Fd) and a VL-CL is positioned amino-terminally relative to the Fc region and/or carboxy-terminally relative to the CD3 binding region of the multispecific polypeptide construct. In some embodiments, the multispecific polypeptide construct contains only one Fab antibody, containing a VH-CH1 (Fd) or VL-CL, that binds to a inhibitory receptor, which can be positioned either amino-terminally relative to the Fc region and/or carboxy-terminally relative to the CD3 binding region. In some embodiments, the multispecific polypeptide construct contains two Fab antibody fragments, each containing a VH-CH1 (Fd) and VL-CL, that binds to a inhibitory receptor, in which one is positioned amino-terminally relative to the Fc region and the other is positioned carboxy-terminally relative to the CD3 binding region.

[0505] In some embodiments, the multispecific polypeptide construct is formed from or includes three or more polypeptides, including a first polypeptide comprising a first Fc polypeptide of a heterodimeric Fc region, a linker and a VH-CH1 (Fd) or VL-CL of a Fab antibody fragment that binds to an inhibitory receptor; a second polypeptide comprising a second Fc polypeptide of the heterodimeric Fc region, the linker and, optionally, the same VH-CH1 (Fd) or VL-CL of the Fab antibody fragment that binds to a inhibitory receptor, and a third polypeptide comprising the other of the VH-CH1 (Fd) or VL-CL of the Fab antibody fragment that binds to the inhibitory receptor. The first, second and/or third polypeptide of the multispecific polypeptide construct also can include an antigen binding domain that binds a TAA or a chain thereof as described in Section II.4. In some embodiments, the antigen binding domain that binds a TAA is a scFv or sdAb and is included as part of the first and/or second polypeptide of the multispecific polypeptide construct. In some embodiments, the antigen binding domain that binds a TAA is a Fab, and the multispecific polypeptide construct is additionally formed from a fourth polypeptide where at least a first and second polypeptide includes a chain of the Fab that binds TAA (e.g. VH-CH1 or VL-CL of a Fab) and the fourth polypeptide contains the other chain of the Fab that binds TAA (e.g. the other of VH-CH1 or VL-CL of a Fab).

[0506] In some embodiments, the IRBR, or independently each of the IRBRs, is or includes a natural (native) cognate binding partner of the inhibitory receptor (e.g. a natural ligand), or a variant thereof that exhibits binding activity to the inhibitory receptor.

[0507] In some embodiments, the one or more IRBR of the provided multispecific polypeptide constructs binds an inhibitory receptor expressed on T cells. In some embodiments, there are more than one IRBR that bind to an inhibitory receptor and each of the IRBRs, such as the first IRBR and the second IRBR, binds the same co-stimulatory receptor. In some embodiments, each of the IRBRs, such as the first IRBR and the second IRBR, binds a different inhibitory receptor. In some embodiments, each of the IRBRs, such as the first IRBR and the second IRBR binds a different epitope on the same inhibitory receptor. In some embodiments, each of the IRBRs, such as the first IRBR and the second IRBR, binds the same epitope on the same inhibitory receptor.

[0508] In some embodiments, the IRBR, or independently each of the IRBRs that bind an inhibitory receptor results in monovalent, bivalent, trivalent, or tetravalent binding to the inhibitory receptor.

[0509] In some embodiments, the inhibitory receptor is expressed on T cells, such as primary T cells of a subject. In some embodiments, the inhibitory receptor is expressed on human T cells, such as primary human T cells of a human subject.

[0510] In some embodiments, the inhibitory receptor is a member of the tumor necrosis factor (TNF) receptor family. In some embodiments, the inhibitory receptor is a member of the immunoglobulin superfamily (IgSF).

[0511] In some embodiments, the inhibitory receptor is Programmed cell death protein 1 (PD-1), cytotoxic T-lymphocyte associated protein 4 (CTLA-4), T cell immunoreceptor with Ig and ITIM domains (TIGIT), V-domain immunoglobulin suppressor of T cell activation (VISTA), T cell immunoglobulin and mucin-domain containing-3 (TIM3), or lymphocyte activation gene 3 (LAG3). In some embodiments, the one or more IRBR is an antibody or fragment thereof that binds to the inhibitor receptor PD-1, CTLA-4, TIGIT, VISTA, TIM3 or LAG3. In particular embodiments, the antibody or antigen-binding fragment is humanized or is human.

[0512] In some examples, the inhibitory receptor binding region (IRBR) binds or comprises a natural cognate binding partner of PD-1, CTLA-4, TIGIT, VISTA, or TIM3. In some embodiments, the natural cognate binding partner is selected from PD-L1, PD-L2, CD80, CD86, CD155, CD112, or VSIG-3/IGSF11, or a functional fragment thereof.

[0513] In some examples, the IRBR contains an antibody fragment, such as an scFv, that contains a variable light (VL) chain and a variable heavy (VH) chain of an antibody that that binds an inhibitory receptor, such as PD-1, CTLA-4, TIGIT, VISTA, or TIM3. In some examples, the IRBR contains a single domain antibody or a VHH domain that specifically binds an inhibitory receptor, such as a PD-1, CTLA-4, TIGIT, VISTA, or TIM3, see e.g. described in PCT publication No. WO2018068695 or WO2018068201.

[0514] In some embodiments, the inhibitory receptor is PD-1. In come embodiments, the one or more IRBR is an antibody fragment that binds to PD-1.

[0515] In some embodiments, the IRBR is or contains a VHH domain that binds PD-1 comprising a CDR1, CDR2 and CDR3 contained in a VHH amino acid sequences selected from any of SEQ ID NO: 421-426, 443, or 519-536 or an amino acid sequence that has at least 90%, 91%, 92%, 93%, 94%, 95%, 96%, 97%, 98%, or 99% sequence identity to the VHH region amino acid selected from any one of SEQ ID NOs: 421-426, 443, or 519-536 and binds PD-1.

[0516] In some embodiments, the IRBR is or contains a VHH domain that contains a CDR1, CDR2, CDR3 contained in a VHH domain set forth in SEQ ID NO: 443, or an amino acid sequence that has at least 90%, 91%, 92%, 93%, 94%, 95%, 96%, 97%, 98%, or 99% sequence identity to the VHH region amino acid selected set forth in SEQ ID NO: 443 and that binds PD-1. In some embodiments, the IRBR is or contains a VHH domain that has the amino acid sequence set forth in SEQ ID NO: 443 or an amino acid sequence that has at least 90%, 91%, 92%, 93%, 94%, 95%, 96%, 97%, 98%, or 99% sequence identity to the amino acid selected set forth in SEQ ID NO: 443 or 519 and that binds PD-1. In some embodiments, IRBR is or contains a VHH domain that is a humanized variant of the amino acid sequence set forth in SEQ ID NO: 443.

[0517] In some embodiments, an IRBR that binds PD-1 has a VHH domain that comprises a CDR1 set forth in any one of SEQ ID NOS: 438, 439 or 440, a CDR2 set forth in SEQ ID NO: 441 and a CDR3 set forth in SEQ ID NO: 442.

[0518] In some embodiments, an IRBR that binds PD-1 has a VHH domain that contains a CDR1, CDR2, and CDR3 set forth in SEQ ID NOs: 439, 441, and 442, respectively. In some embodiments, an IRBR that binds PD-1 has a VHH domain that contains a CDR1, CDR2 and CDR3 set forth in SEQ ID NOs: 438, 441, and 442, respectively. In some embodiments, the an IRBR that binds PD-1 has a VHH domain that contains a CDR1, CDR2 and CDR3 set forth in SEQ ID NOs: 440, 441, and 442, respectively.

[0519] In some aspects, the IRBR is or contains a VHH domain that contains a CDR1, CDR2 and CDR3 contained in a VHH amino acid sequence selected from any of SEQ ID NO:421-437, or an amino acid sequence that has at least 90%, 91%, 92%, 93%, 94%, 95%, 96%, 97%, 98%, or 99% sequence identity to the V_{H}H region amino acid selected from any one of SEQ ID NOs: 421-437 and that binds PD-1.

[0520] In some cases, the IRBR contains a VHH domain that is a humanized variant that has the amino acid sequence set forth in any of SEQ ID NOS: 421-437 or an amino acid sequence that has at least 90%, 91%, 92%, 93%, 94%, 95%, 96%, 97%, 98%, or 99% sequence identity to the VHH region amino acid selected from any one of SEQ ID NOs: 421-437 and that binds PD-1. In some embodimetns, the IRBR is or contains a VHH domain seqeunce that is a humanized VHH domain having the sequence of amino acids set forth in any one of SEQ ID NOS: 421-437.

[0521] In some embodiments, the IRBR is or contains a VHH domain that contains a CDR1, CDR2, CDR3 contained in a VHH domain set forth in SEQ ID NO: 519, or an amino acid sequence that has at least 90%, 91%, 92%, 93%, 94%, 95%, 96%, 97%, 98%, or 99% sequence identity to the VHH region amino acid selected set forth in SEQ ID NO: 519 and that binds PD-1. In some embodiments, the IRBR is or contains a VHH domain that has the amino acid sequence set forth in SEQ ID NO: 519 or an amino acid sequence that has at least 90%, 91%, 92%, 93%, 94%, 95%, 96%, 97%, 98%, or 99% sequence identity to the amino acid selected set forth in SEQ ID NO: 519 or 519 and that binds PD-1. In some embodiments, IRBR is or contains a VHH domain that is a humanized variant of the amino acid sequence set forth in SEQ ID NO: 519.

[0522] In some embodiments, an IRBR that binds PD-1 has a VHH domain that comprises a CDR1 set forth in any one of SEQ ID NOS: 438, 439 or 440, a CDR2 set forth in SEQ ID NO: 441 and a CDR3 set forth in SEQ ID NO: 442.

[0523] In some embodiments, an IRBR that binds PD-1 has a VHH domain that contains a CDR1, CDR2, and CDR3 set forth in SEQ ID NOs: 439, 441, and 442, respectively. In some embodiments, an IRBR that binds PD-1 has a VHH domain that contains a CDR1, CDR2 and CDR3 set forth in SEQ ID NOs: 438, 441, and 442, respectively. In some embodiments, the an IRBR that binds PD-1 has a VHH domain that contains a CDR1, CDR2 and CDR3 set forth in SEQ ID NOs: 440, 441, and 442, respectively.

[0524] In some aspects, the IRBR is or contains a VHH domain that contains a CDR1, CDR2 and CDR3 contained in a VHH amino acid sequence selected from any of SEQ ID NO: 520-536, or an amino acid sequence that has at least 90%, 91%, 92%, 93%, 94%, 95%, 96%, 97%, 98%, or 99% sequence identity to the V_{H}H region amino acid selected from any one of SEQ ID NOs: 520-536 and that binds PD-1.

[0525] In some cases, the IRBR contains a VHH domain that is a humanized variant that has the amino acid sequence set forth in any of SEQ ID NOS: 520-536 or an amino acid sequence that has at least 90%, 91%, 92%, 93%, 94%, 95%, 96%, 97%, 98%, or 99% sequence identity to the VHH region amino acid selected from any one of SEQ ID NOs: 520-536 and that binds PD-1. In some embodimetns, the IRBR is or contains a VHH domain seqeunce that is a humanized VHH domain having the sequence of amino acids set forth in any one of SEQ ID NOS: 520-536.

[0526] In some embodiments, the one or more IRBR is linked, directly or indirectly via a linker, to the Fc region and/or to the CD3 binding region. In some embodiments, linkage is via a linker. In some embodiments, the linker is a linking peptide (LP), which can include any flexible or rigid linker as described, such as in Section II.3, although generally the peptide linking the IRBR or regions is not a cleavable liker.

[0527] In some embodiments, the multispecific polypeptide construct comprises a linking peptide (LP) between the IRBR and the Fc region. In some embodiments, the multispecific polypeptide construct comprises a linking peptide (LP) between the CD3 binding region and the IRBR.

[0528] In some embodiments, the multispecific polypeptide construct comprises more than one IRBR. In some embodiments, the multispecific polypeptide construct comprises a first linking peptide (LP1) between the first IRBR and the Fc region. In some embodiments, the multispecific polypeptide construct comprises a second linking peptide (LP2) between the CD3 binding region and the second IRBR. In some embodiments, the multispecific polypeptide construct comprises a first linking peptide (LP1) between the first IRBR and the Fc region and a second linking peptide (LP2) between the CD3 binding region and the second CRBR. In some aspects, the multispecific polypeptide construct has the structural arrangement from N-terminus to C-terminus as follows: IRBR and/or antigen binding domain-LP1-Fc region-linker-CD3 binding region-LP2-IRBR and/or antigen binding domain. In some embodiments, the two linking peptides are not identical to each other.

[0529] In some embodiments, the LP (e.g., LP1 or LP2) is independently a peptide of about 1 to 20 amino acids in length. In some embodiments, the LP1 or LP2 is independently a peptide that is or comprises any Gly-Ser linker as set forth in SEQ ID NOs: 191-194, 313-319, 332, 465, or GGS.

[0530] In some embodiments, the multispecific polypeptide construct contains both a CRBR and an IRBR. In some embodiments, one of the CRBR or IRBR is positioned amino-terminally relative to the Fc region and the other of the CRBR or IRBR is positioned carboxy-terminally relative to the CD3 binding region of the multispecific polypeptide construct. In some embodiments, the CRBR and IRBR are present on different polypeptide of a heterodimeric multispecific polypeptide construct, in which at least one of the polypeptides also contains the at least one antigen binding domain specific to a TAA. In some embodiments, the CRBR and IRBR are present on the same polypeptide (first polypeptide) of a heterodimeric multispecific polypeptide construct and the at least one antigen binding domain specific to a TAA is on the other (or second) polypeptide of the heterodimeric multispecific polypeptide construct.

[0531] In some embodiments, the multispecific polypeptide construct is formed from or includes two polypeptides. In some aspects, the first polypeptide comprises in order: a first antigen binding domain specific for a TAA, a first Fc polypeptide of a heterodimeric Fc region, a linker, a VH domain of an anti-CD3 antibody or antigen binding fragment (e.g. Fv), and a second antigen binding domain specific for a TAA; and a second polypeptide comprising in order: one of the IRBR or CRBR, a second Fc polypeptide of the heterodimeric Fc region, the linker, a VL domain of the anti-CD3 antibody or antigen binding fragment (e.g. Fv) , and the other of the IRBR or CRBR. In some embodiments, the IRBR is positioned on the second polypeptide carboxy-terminally to the CD3 binding region and the CRBR is positioned on the second polypeptide amino-terminally to the Fc region. In some embodiments, the IRBR is positioned on the second polypeptide amino-terminally to the Fc region and the CRBR is positioned on the second polypeptide carboxy-terminally to the CD3 binding region. In some embodiments, the first and second antigen binding domain is specific to a TAA are the same. In some embodiments, the first and second antigen binding domain is specific to a TAA are different. In some embodiments, the first antigen binding domain and the second antigen binding domain bind a different TAA. In some embodiments, the first antigen binding domain and the second antigen binding domain bind a distinct or non-overlapping epitope of the same TAA and/or compete for binding to the same TAA.

### 3. NK Recruitment

[0532] In some embodiments, the B7H3-binding polypeptide is a bispecific construct that is or comprises at least one B7H3 VHH domain provided herein and at least one additional binding molecule capable of binding to a surface molecule expressed on a Natural Killer (NK) cells and/or recruiting NK cells. In particular aspects, the multispecific construct is bispecific for B7H3 and the NK cell surface molecule. In some embodiments, the surface molecule is CD16 (FcγRIII). Specifically, a provided bispecific B7H3-binding polypeptide is capable of specifically binding an an NK activating receptor expressed on a human NK cells cell, such as human CD16a.

[0533] CD16, a low affinity receptor for the Fc portion of some IgGs known to be involved in antibody-dependent cellular cytotoxicity (ADCC), is the best-characterized membrane receptor responsible for triggering of target cell lysis by NK cells (Mandelboim et al., 1999, PNAS 96:5640-5644). Generally, a large majority (approximately 90%) of human NK cells express CD56 at low density (CD56dim) and FcγRIII (CD16) at a high level (Cooper et al., 2001, Trends Immunol. 22:633-640). Human FcγRIII exists as two isoforms, CD16a (FcγRIIIA) and CD16b (FcγRIIIB), that share 96% sequence identity in their extracellular immunoglobulin-binding regions (van de Winkel and Capel, 1993, Immunol. Today 14(5):215-221). In particular embodiments, the additional binding molecule is capable of specifically binding CD16a.

[0534] CD16a is expressed on macrophages, mast cells, and NK cells as a transmembrane receptor. On NK cells, the alpha chain of CD16a associates with the immunoreceptor tyrosine-based activation motif (ITAM) containing FcεRI γ-chain and/or the T-cell receptor (TCR)/CD3 ζ-chain to mediate signalling (Wirthmueller et al., 1992, J. Exp. Med. 175:1381-1390). The interaction of CD16a with different combinations of homo- and hetero-dimers of the γ and ζ chains has been observed in NK cells, indicating the ability to mediate signaling via different signaling pathways via variations of the CD16a complex in NK cells (Anderson et al., 1990, PNAS 87(6):2274-2278; Ackerly et al., 1992, Int. J. Cancer Suppl. 7:11-14). FcγR-expressing effector cells have been shown to be involved in destroying tumor cells via ADCC. For example, engagement of CD16a, such as with an agonist binding molecule capable of specifically binding CD16a can result in activating of NK cells expressing CD16a, thereby eliciting a biological response, in particular a signaling response. In some cases, the binding molecule is capable of triggering cell killing, in a manner analogous to antibody-dependent cellular cytotoxicity (ADCC), by virtue of its binding to such cells.

[0535] In particular example, B7H3-binding polypeptides include bispecific molecules that can specifically bind to B7H3 and to CD16a may target NK cells to cells bearing such antigen, so that the cell bearing the antigen may be eradicated via NK cell mediated cell killing For example, a binding molecule that specifically binds B7H3 expressed on a tumor cell may target NK-cells to the tumor cell. In some cases, activation of the NK cell caused by the binding molecule binding to CD16a can lead to killing of the tumor cells.

[0536] In some embodiments, the additional binding domain specific to an activating NK cell receptor, such as CD16a, is an antigen-binding fragment selected from a Fab fragment, a F(ab′)₂ fragment, an Fv fragment, a scFv, disulfide stabilized Fv fragment (dsFv), a scAb, a dAb, a single domain heavy chain antibody (VHH), or a single domain light chain antibody. In some embodiments, the additional binding domain is monovalent for binding the activating T NK cell receptor, such as CD16a.

[0537] In some cases, the additional binding domain recognizes CD16a. In some embodiments, the anti-CD16a binding domain includes one or more copies of an anti-CD16a Fab fragment, an anti-CD16a F(ab′)₂ fragment, an anti-CD16a Fv fragment, an anti-CD16a scFv, an anti-CD16a dsFv, an anti-CD16a scAb, an anti-CD16a dAb, an anti-CD16a single domain heavy chain antibody (VHH), and an anti-CD16a single domain light chain antibody. In some embodiments, the anti-CD16a binding domain is monovalent for binding CD16a. In some embodiments, the BH73-binding polypeptide is a bispecific construct that binds BH73 and agonizes the activity of CD16a.

[0538] Antibodies and antigen-binding fragments thereof specific for CD16a are known and include, for example, NM3E2 (McCall et al. (1999) Mol. Immunol., 36:433-045. Other anti-CD16a antibodies also can be used in the constructs provided herein, including any described in published U.S. patent application No. US10160280795; U.S. Pat. No. 9,701,750; Behar et al. (2008) Protein Eng Des Sel. 21:1-10; Arndt et al., (1999) Blood 94:2562-2568. In particular examples, the anti-CD16a is an anti-CD16a scFv. In some embodiments, the anti-CD16a is an anti-CD16a antibody included in a TandAb molecule (see e.g. Reush et al. (2014) Mabs, 6:727-738). In some apects, the anti-CD16a is an anti-CD16a or antigen binding fragment, such as scFv, described in U.S. Pat. No. 9,035,026.

[0539] The provided bispecific constructs can be formatted in any of a number of formats containing the at least one B7H3 VHH domain and the at least one additional domain specific to an activating NK cell receptor, such as a CD16a-binding domain.

[0540] In one embodiment, the bispecific construct is a bispecific single-domain antibody-linked Fab (S-Fab) containing at least one B7H3 VHH domain as described linked, directly or indirectly to a Fab antigen binding fragment specific to an NK cell activating receptor, e.g. CD16a, such as an anti-CD16a Fab. In some embodiments, the B7H3 VHH domain is linked to the C-terminus of the VH or VL chain of an anti-C16a Fab. In some embodiments, the S-Fab can be further modified, such as by conjugation with polyethylene glycol (PEG), N-(2-hydroxypropyl) methacrylamide (HPMA) copolymers, proteins (such as albumin), polyglutamic acid or PASylation (Pan et al. (2018) International Jounral of Nanomedicine, 2018:3189-3201).

[0541] In another embodiment, the bispecific construct is a scFv-single domain antibody in which the construct contains at least one B7H3 VHH as described linked, directly or indirectly, to an scFv containing a VH and a VL of an antigen binding domain specific to an NK cell activating receptor, e.g. CD16a. The scFv against an NK cell activating receptor, e.g. anti-CD16a scFv, can contain any of the VH and VL sequences as described. In some embodiments, the VHH domain and the scFv are connected by a linker, such as a peptide linker. In some embodiments, the peptide linker can be a peptide linker as described herein. In some embodiments, the VHH domain and the scFv are each connected, optionally through a hinge region or a linker (e.g. peptide linker), to an Fc region, such as an N-terminus of an Fc region. The Fc region can be any described herein, such as a human Fc region or a variant thereof, e.g. a human IgG1 Fc region or a variant thereof. In particular examples, the Fc region is formed by variant Fc domains, e.g. variant human IgG1 domains, that are mutated or modified to promote heterodimerization in which different polypeptides can be dimerized to yield a heterodimer.

[0542] In a further embodiment, the antigen binding domain specific to an NK cell activating receptor, e.g. CD16a, is a single domain antibody, such as is a VHH domain that specifically binds to CD16a. Single domain antibodies, including VHH domains that bind to CD16a are known, see e.g. published U.S. patent application No. US20160280795. In such aspects, a bispecific construct provided herein can include at least one B7H3 VHH domain and at least one CD16a VHH domain. For formatting the constructs, in some cases, each VHH domain is connected, optionally through a hinge region or linker (e.g. peptide linker), to an Fc region, such as an N-terminus of an Fc region. The Fc region can be any described herein, such as a human Fc region or a variant thereof, e.g. a human IgG1 Fc region or a variant thereof. In particular examples, the Fc region is formed by variant Fc domains, e.g. variant human IgG1 domains, that are mutated or modified to promote heterodimerization in which different polypeptides can be dimerized to yield a heterodimer.

[0543] In the above embodiments, exemplary modifications of an Fc region to promote heterodimerization are known, including any as described below, e.g. Table 3. In some embodiments, one Fc polypeptide of a heterodimeric Fc comprises the sequence of amino acids set forth in any of SEQ ID NOS:293, 297, 305, 307, 445, or 451 and the other Fc polypeptide of the heterodimeric Fc contains the sequence of amino acids set forth in any of SEQ ID NOS:294, 298, 301, 303, 309, 311, 446, 449, or 453. In some embodiments, one Fc polypeptide of a heterodimeric Fc comprises the sequence of amino acids set forth in any of SEQ ID NOS: 295, 299, 306, 308, 447, or 452 and the other Fc polypeptide of the heterodimeric Fc comprises the sequence of amino acids set forth in any of SEQ ID NOS: 296, 300, 302, 304, 310, 312, 448, 450, or 454.

4. Cytokine Fusion and/or Cytokine Receptor Targeting

[0544] In some embodiments, the B7H3-binding polypeptide is a multispecific polypeptide construct that is a cytokine-antibody fusion protein (also called a B7H3 VHH-cytokine fusion). In some aspects, at least one B7H3 VHH domain provided herein is linked, directly or indirectly, to at least one cytokine, such as to an interferon. In particular embodiments, the cytokine is an interferon capable of exhibiting anti-proliferative activity, apoptotic activity and/or anti-viral activity. In some embodiments, the interferon of a B7H3 VHH-cytokine fusion provided herein is capable of binding to a receptor composed of IFNAR1 and/or 2. Any of a variety of assays can be used to assess the effect of such fusion proteins on binding IFNAR1 and/or 2, reducing or decreasing the growth rather and/or proliferation rate of a cancer cell, reducing tumor size, eliminating tumors or inducing the death of a cancer cell (e.g. via apoptosis). Such assays in include in vitro assays with various cancer cell lines known to express B7H3 or in vivo assays employing animal tumor models.

[0545] In some embodiments, the interferon is a type I interferon, such as a human type I interferon or a variant thereof. In some aspects, the human type I interferon is a variant that is a truncated human type I interferon or a human mutant type I interferon. In some embodiments, the type I interferon or variant thereof is a wild-type human IFN-alpha (IFN-alpha; alpha2 and natural higher affinity variants such as alpha 14), interferon beta (IFN-beta) as well as mutants and/or truncated forms thereof. In some embodiments, the interferon is a type II interferon, such as a human type II interferon or a variant thereof. In some aspects, the human type II interferon is a variant that is a truncated human type II interferon or a human mutant type II interferon. In some embodiments, the type II interferon or variant thereof is a wild-type human interferon gamma (IFN-gamma) as well as mutants and/or truncated forms thereof. In some embodiments, the provided cytokine-antibody fusion proteins can be used to inhibit the growth and/or proliferation of target cells (e.g. cancer cells) that express or overexpress B7H3.

[0546] In some embodiments, the B7H3 VHH-cytokine fusion protein is similar in format to any as described in International PCT published application No. WO2014194100; U.S. Pat. No. 9,803,021; Valedkarimi et al. (2017) Biomed Pharmacother., 95:731-742; or Young et al. (2014) Semin Oncol., 41:623-636.

[0547] In particular embodiments, the interferon, e.g. a type I interferon, such as a human type I interferon (e.g. IFN-alpha, IFN-beta, or IFN-gamma) is one that possesses the endogenous binding affinity and/or activity of the native or wild-type interferon, preferably at a level of at least 60%, or of at least or at least about 80%, such as at least 90%, 95%, 98%, 99%, 100%, or a level greater than the native wild-type interferon (in its isolated form).

[0548] Interferons and interferon mutants are a well known and well characterized group of cytokines (see e.g., WO 2002/095067; WO 2002/079249; WO 2002/101048; WO 2002/095067; WO 2002/083733; WO 2002/086156; WO 2002/083733; WO 2003/000896; WO 2002/101048; WO 2002/079249; WO 2003/000896; WO 2004/022593; WO2004/022747; WO 2003/023032; WO 2004/022593 and also in Kim et al. (2003) Cancer Lett. 189(2): 183-188; Hussain et a/. (2000) J. Interferon Cytokine Res. 20(9): 763-768; Hussain et al. (1998) J. Interferon Cytokine Res. 18(7): 469-477; Nyman et al. (1988) Biochem. J. 329 (Pt 2): 295-302; Golovleva et al. (1997) J. Interferon Cytokine Res. 17(10): 637-645; Hussain et al. (1997) J. Interferon Cytokine Res. 17(9): 559-566; Golovleva et al. (1997) Hum. Hered. 47(4): 185-188; Kita et al. (1991) J. Interferon Cytokine Res. 17(3): 135-140; Golovleva et al. (1996) Am. J. Hum. Genet. 59(3): 570-578; Hussain et al. (1996) J. Interferon Cytokine Res. 16(7): 523-529; Linge et al. (1995) Biochim Biophys Acta. Any of such can be used in the provided cytokine-antibody fusion proteins.

[0549] In some embodiments, the interferon is a human type I interferon. Alleles of the human interferon family of genes/proteins are known, see e.g. Pestka (10983) Arch Biochem Biophys., 221:1-37; Diaz et al. (1994) Genomics, 22:540-52; Pestka (1986) Meth. Enzymol, 199: 3-4; and Krause et al. (2000) J. Biol. Chem., 275:22995-3004.

[0550] In some embodiments, the interferon is a full-length IFN-alpha (e.g. human IFN-alpha), a full-length IFN-beta (e.g. human IFN-beta) or a full-length IFN-gamma (e.g. human IFN-gamma). In some embodiments, the interferon is a biologically active truncated IFN-alpha (e.g. human IFN-alpha), a biologically active truncated IFN-beta (e.g. human IFN-beta) or a biologically active truncated IFN-gamma (e.g. human IFN-gamma). In some embodiments, a biologically active truncated interferon contains a contiguous sequence of amino acids of a wild-type or native interferon that is truncated at the N- and/or C-terminus and comprises a length that is at least or at least about 50%, 55%, 60%, 65%, 70%, 75%, 80%, 85%, 90% or more the length of the native or wild-type interferon. Any of a variety of standard assays for assessing biological activity of an interferon can be used. For example, IFN-alpha activity can be assayed by measuring antiviral activity against a particular test virus. Kits for assaying for IFN-alpha activity are commercially available (see, e.g., ILITE™ alphabeta kit by Neutekbio, Ireland). In some aspects, the IFN-alpha is an IFN-ata (e.g. Acc. No. CAA23805), IFN-a-c (Acc. No. P01566), IFN-a-d (Acc. No. AAB59403); IFNa-5 (Acc. No. CAA26702); IFNa-6 (Acc. No. AA26704); IFNa-4 (Acc. No. NP_066546); IFNa-4b (Acc. No. CAA26701); IFNa-I (Acc. No. AAA52725); IFNa-J (Acc. No. CAA23792); IFNa-H (Acc. No. CAA23794); IFNa-F (Acc. No. AAA52718); IFNa-7 (Acc. No. CAA26903), or is a biologically active fragment thereof. In some aspects, the IFN-beta is IFN-beta set forth in Acc. No. AAC41702 or is a biologically active fragment thereof. In some aspects, the IFN-gamma is IFN-gamma set forth in Acc. No. P01579 or is a biologically active fragment thereof.

[0551] In some embodiments, a provided B7H3 VHH-cytokine fusion contains a variant or mutant interferon alpha 2 (IFNa2) is contemplated. Certain mutants include a mutation of the His at position 57, and/or the E at position 58, and/or the Q at position 61. In certain embodiments the mutants include the mutation H57Y, and/or E58N, and/or Q61S. In certain embodiments the mutants include a mutated IFNa2 having the mutations H57Y, E58N, and Q61S (YNS) (see, e.g., Kalie et al. (2007) J. Biol. Chem., 282: 11602-11611). In other embodiments mutants include a mutation of the His at position 57, and/or the E at position 58, and/or the Q at position 61 to A (alanine). In certain embodiments the mutants include a mutated IFNa2 having the mutations H57A, E58A, and Q61A (HEQ) (see, e.g., Jaitin et al. (2006) Mo/. Cellular Biol, 26(5): 1888-1897). In certain embodiments the mutant interferon comprises a mutation of His at position 57 to A, Y, or M, and/or a mutation of E at position 58 to A, or N, or D, or L, and/or a mutation of Q at position 61 to A, or S, or L, or D. [0244] In certain embodiments mutant include mutants of interferon alpha 8 (IFN-a8), such as variants with amino acid replacement corresponding to R145 to V, I, or L, and/or A146 to N, or S, and/or M149 to Y, e.g. R145V/A146N/M149Y), R145I,/A146S/M149Y or R145L/A146S/M149Y (see, e.g,. Yamamoto et.al.. (2009) J. Interferon & cytokine Res, 29: 161-170.

[0552] In some embodiments, a provided B7H3 VHH-cytokine fusion contains a mutant or variant IFN-beta containing a serine substituted for the naturally occurring cysteine at amino acid 17 (see, e.g., Hawkins et al. (1985) Cancer Res., 45, 5914-5920).

[0553] In some embodiments, a provided B7H3 VHH-cytokine fusion contains a truncated interferon. In one embodiment, a truncated interferon includes a human IFN-alpha with deletions of up to the first 15 amino-terminal amino acid residues and/or up to the last 10-13 carboxyl-terminal amino acid residues, which has been shown to retain activity of the native or wild-type human IFN-alpha (see e.g. Ackerman (1984) Proc. Natl. Acad. Sci, USA, 81 : 1045-1047). In some embodiments, a truncated human IFN-alpha has 1, 2, 3, 4, 5, 6, 7, 8, 9, 10, 11, 12 or 13 carboxyl terminal amino acid residues deleted and/or 1, 2, 3, 4, 5, 6, 7, 8, 9, 10, 11, 12, 13, 14, or 15 amino terminal amino acid residues deleted.

[0554] In some embodiments, a provided B7H3 VHH-cyokine fusion contains a truncated interferon, such as described in published U.S. patent appl. No. US2009/0025106. In some embodiments, a provided B7H3 VHH-cytokine fusion contains a truncated IFN-gamma containing N- and/or C-terminal deletions, such as described in Lundell et al. (1991) Protein Neg., 4:335-341; Pan et al. (1987 (Eur. J. Biochem., 166:145-149); WO.

[0555] In some embodiments, the interferon, e.g. human interferon, is a mutant interferon that is resistant to proteolysis compared to the unmodified, typically wild-type protein, see e.g. U.S. Pat. Nos. 7,998,469; 8,052,964; 4,832,959; 6,120,762; WO1992/008737; and EP219781.

[0556] In aspects of the provided B7H3 VHH-cytokine fusion proteins, the antibody and the cytokine, e.g. interferon, are attached directly or are attached indirectly via a linker, such as a peptide linker. The attachment can be to the N- or C-terminus of the VHH domain, so long as the attachment does not interfere with binding of the antibody to B7H3. Any linker, e.g. peptide linker, described herein can be used. In some embodiments, the linker is a GS-linker that comprises an amino acid sequence selected from the group consisting of GGSGGS, i.e., (GGS)₂ (SEQ ID NO: 191); GGSGGSGGS, i.e., (GGS)₃ (SEQ ID NO: 192); GGSGGSGGSGGS, i.e., (GGS)₄ (SEQ ID NO: 193); and GGSGGSGGSGGSGGS, i.e., (GGS)₅ (SEQ ID NO: 194). In some embodiments, the linker is a flexible linker comprising Glycine residues, such as, by way of non-limiting example, GG, GGG, GGGG (SEQ ID NO: 195), GGGGG (SEQ ID NO: 196), and GGGGGG (SEQ ID NO: 197). In some embodiments, the fusion proteins can include a combination of a GS-linker and a Glycine linker.

### D. Chimeric Receptors and Engineered Cells

[0557] Provided herein are chimeric antigen receptors (CARs) having an extracellular domain comprising one or more of the B7H3 VHH domains provided herein, such as any of the sequences of a B7H3 VHH domain provided herein. CAR constructs provided herein include an extracellular domain containing the one or more B7H3 VHH, a transmembrane domain and an intracellular signaling region. The one or more B7H3 VHH domain which form the antigen binding unit of the CAR “binds” or is “capable of binding”, i.e. targets, B7H3 with sufficient affinity such the CAR is useful in therapy in targeting a cell or tissue expressing B7H3.

[0558] CARs are synthetic receptors typically containing an extracellular targeting/binding moiety that is associated with one or more signaling domains in a single fusion molecule, and that is expressed on the surface of a cell, such as a T cell. Thus, CARs combine antigen-specificity and T cell activating properties in a single fusion molecule. First generation CARs typically included the cytoplasmic region of the CD3zeta or Fc 1 receptor y chain as their signaling domain. First generation CARs have been tested in phase I clinical studies in patients with ovarian cancer, renal cancer, lymphoma, and neuroblastoma, where they have induced modest responses (reviewed in Sadelain et al., Curr Opin Immunol, 21 (2): 215-223, 2009). Second generation CARs, which contain the signalling domains of a costimulatory molecule, such as CD28, and CD3zeta, provide dual signalling to direct combined activating and co-stimulatory signals. Third generation CARs are more complex with three or more signaling domains (reviewed in Sadelain et al., Cancer Discovery (3), 388-398, 2013 and Dotti et al, Immuno. Rev, 257 (1), 1-36, 2014).

[0559] In some embodiments, a provided CAR contains at least one antigen binding domain comprising a B7H3 VHH domain that targets or is capable of specifically binding B7H3. In some embodiments, the CAR contains at least two antigen binding domains (where at least one comprises a B7H3 VHH domain) which target one or more antigen. In one embodiment, the antigen binding domain of a CAR comprises two or at least two B7H3 VHH domains that are specific for B7H3, thus providing a bivalent binding molecule. In one embodiment, the antigen binding domain comprises two or at least two B7H3 VHH domains that are specific for B7H3, but bind to different epitopes on said antigen. In such cases, the antigen binding domain comprises a first B7H3 VHH domain that binds to a first epitope of B7H3 and a second VHH domain that binds to a second epitope of B7H3. The epitopes may be overlapping. Thus, in some embodiments, the antigen binding domain is biparatopic and the CAR is a biparatopic CAR. In yet another embodiment, the antigen binding domain comprises two B7H3 VHH domains that are specific for B7H3 and bind to the same epitopes on B7H3.

[0560] The transmembrane domain of a CAR provided herein is a domain that typically crosses or is capable of crossing or spanning the plasma membrane and is connected, directly or indirectly (e.g. via a spacer, such as an immunoglobulin hinge sequence) to the extracellular antigen binding domain and the endoplasmic portion containing the intracellular signaling domain. In one embodiment, the transmembrane domain of the CAR is a transmembrane region of a transmembrane protein (for example Type I transmembrane proteins), an artificial hydrophobic sequence or a combination thereof. In one embodiment, the transmembrane domain comprises the CD3zeta domain or CD28 transmembrane domain. Other transmembrane domains will be apparent to those of skill in the art and may be used in connection with embodiments of a CAR provided herein.

[0561] The intracellular signaling region of a CAR provided herein contains one or more intracellular signaling domain that transmits a signal to a T cell upon engagement of the antigen binding domain of the CAR, such as upon binding antigen. In some embodiments, the intracellular region contains an intracellular signaling domain that is or contains an ITAM signaling domain. Exemplary intracellular signaling domains include, for example, a signaling domain derived from ζ chain of the T-cell receptor complex or any of its homologs (e.g., η chain, FcsRIy and β chains, MB 1 (Iga) chain, B29 (Ig) chain, etc.), human CD3zeta chain, CD3 polypeptides (Δ, δ and ε), syk family tyrosine kinases (Syk, ZAP 70, etc.), src family tyrosine kinases (Lck, Fyn, Lyn, etc.) and other molecules involved in T-cell transduction, such as CD2, CDS, OX40 and CD28. In particular embodiments, the intracellular signaling region contains an intracellular signaling domain derived from the human CD3 zeta chain.

[0562] In some embodiments, the endodomain comprises at CD3-zeta signaling domain. In some embodiments, the CD3-zeta signaling domain comprises the sequence of amino acids set forth in SEQ ID NO: 281 or a sequence of amino acids that exhibits at least 85%, 86%, 87%, 88%, 89%, 90%, 91%, 92%, 93%, 94%, 95%, 96%, 97%, 98% or 99% or more sequence identity to SEQ ID NO:281 and retains the activity of T cell signaling.

[0563] In some embodiments, the intracellular signaling region of a CAR can further contain an intracellular signaling domain derived from a costimulatory molecule. In such examples, such a signaling domain may enhance CAR-T cell activity, such as via enhancement of proliferation, survival and/or development of memory cells, after antigen specific engagement, for example, compared to a CAR that only contains an ITAM containing signaling domain, e.g. CD3 zeta. In some embodiments, the co-stimulatory domain is a functional signaling domain obtained from a protein selected from: CD28, CD137 (4-IBB), CD134 (OX40), Dap10, CD27, CD2, CDS, ICAM-1 , LFA-1 (CD11a/CD18), Lck, TNFR-I, TNFR-II, Fas, CD30, CD40 or combinations thereof. In particular embodiments, the costimulatory signaling domain is derived or obtained from a human protein. In some aspects, the costimulatory signaling domain is derived or obtained from human CD28 or human CD137 (4-IBB).

[0564] In some embodiments, the costimulatory signaling domain is a derived from CD28 or 4-1BB and comprises the sequence of amino acids set forth in any of SEQ ID NOS: 282-285 or a sequence of amino acids that exhibits at least 85%, 86%, 87%, 88%, 89%, 90%, 91%, 92%, 93%, 94%, 95%, 96%, 97%, 98% or 99% or more sequence identity to SEQ ID NO:282-285 and retains the activity of T cell costimulatory signaling.

[0565] In particular embodiments, the CAR further comprises a hinge or spacer region which connects the extracellular antigen binding domain and the transmembrane domain. This hinge or spacer region can be used to achieve different lengths and flexibility of the resulting CAR. Examples of the a hinge or spacer region that can be used include, but are not limited to, Fc fragments of antibodies or fragments or derivatives thereof, hinge regions of antibodies, or fragments or derivatives thereof, C_{H}2 regions of antibodies, C_{H}3 regions of antibodies, artificial spacer sequences, for example peptide sequences, or combinations thereof. Other hinge or spacer region will be apparent to those of skill in the art and may be used. In one embodiment, the hinge is an lgG4 hinge or a CD8A hinge.

[0566] In some embodiments, the spacer and transmembrane domain are the hinge and transmembrane domain derived from CD8, such as having an exemplary sequence set forth in SEQ ID NO: 286-288 or a sequence of amino acids that exhibits at least 85%, 86%, 87%, 88%, 89%, 90%, 91%, 92%, 93%, 94%, 95%, 96%, 97%, 98%, 99% or more sequence identity to SEQ ID NO:286-288.

[0567] Also provided herein is an isolated nucleic acid construct comprising at least one nucleic acid encoding a CAR as provided herein. In some aspects, the construct is an expression vector for expression of the CAR in a cell. The expression vector may be a viral vector. Viral vector technology is well known in the art and is described, for example, in Sambrook et al. (Molecular Cloning: A Laboratory Manual, Cold Spring Harbor Laboratory, New York, 2013). A number of viral based systems have been developed for gene transfer into mammalian cells. For example, retroviruses such as, adenovirus vectors are used. In one embodiment, a lentivirus vector is used.

[0568] In a further aspect, also provided is an isolated cell or cell population comprising one or more nucleic acid construct as described above. Also provided is an isolated cell or cell population that has been genetically modified to express a CAR provided herein. Thus, provided herein are genetically engineered cells which comprise, such as stably express, a CAR provided herein. In one embodiment, the cell is selected from the group consisting of a T cell, a Natural Killer (NK) cell, a cytotoxic T lymphocyte (CTL), a regulatory T cell, hematopoietic stem cells and/or pluripotent embryonic/induced stem cells. In some cases, the cell is a T cell, such as a CD4 and/or CD8 T cell. In some embodiments, the cells are autologous to the subject. For example, in some embodiments, T cells may be isolated from a patient (also called primary T cells) for engineering, e.g. transfection or transduction, with a CAR nucleic acid construct.

[0569] In an exemplary example, primary T-cells can be purified ex vivo (CD4 cells or CD8 cells or both) and stimulated with a TCR/CD28 agonists, such as anti-CD3/anti-CD28 coated beads. After a 2 or 3 day activation process, a recombinant expression vector encoding the CAR can be stably introduced into the primary T cells through standard lentiviral or retroviral transduction protocols or plasmid electroporation strategies. Cells can be monitored for CAR expression by, for example, flow cytometry using anti-epitope tag or antibodies that cross-react with native parental molecule. T-cells that express the CAR can be enriched through sorting with anti-epitope tag antibodies or enriched for high or low expression depending on the application.

[0570] The CAR engineered T-cells can be assayed for appropriate function by a variety of means. In some cases, in vitro cytotoxicity, proliferation, or cytokine assays (e.g., IFN-gamma expression) can be used to assess the function of engineered T-cells. Exemplary standard endpoints are percent lysis of a tumor line, proliferation of the engineered T-cell, or IFN-gamma protein expression in culture supernatant. In some cases, the ability to stimulate activiation of T cells upon stimulation of the CAR, e.g. via antigen, can be assessed, such as by monitoring expression of activation markers such as CD69, CD44, or CD62L, proliferation and/or cytokine production.

[0571] Also provided herein are methods for the prevention and/or treatment of a disease or condition in a subject, such as a cancer, that includes administering to a subject engineered cells comprising a CAR provided herein. Generally, the subject is in need of treatment for the disease or condition. pharmaceutically active amount of a cell and/or of a pharmaceutical composition of the invention.

### IV. POLYPEPTIDE EXPRESSION AND PRODUCTION

[0572] Nucleic acid molecules comprising polynucleotides that encode any of the provided sdAb and B7H3-binding polypeptides are provided. In some embodiments, the provided nucleic acid sequences and particularly DNA sequences encode fusion proteins as provided herein. In any of the foregoing embodiments, the nucleic acid molecule may also encode a leader sequence that directs secretion of the B7H3-binding polypeptide, which leader sequence is typically cleaved such that it is not present in the secreted polypeptide. The leader sequence may be a native heavy chain (or VHH) leader sequence, or may be another heterologous leader sequence.

[0573] Nucleic acid molecules can be constructed using recombinant DNA techniques conventional in the art. In some embodiments, a nucleic acid molecule is an expression vector that is suitable for expression in a selected host cell.

[0574] Vectors comprising nucleic acids that encode the B7H3-binding polypeptides described herein are provided. Such vectors include, but are not limited to, DNA vectors, phage vectors, viral vectors, retroviral vectors, etc. In some embodiments, a vector is selected that is optimized for expression of polypeptides in a desired cell type, such as CHO or CHO-derived cells, or in NSO cells. Exemplary such vectors are described, for example, in Running Deer et al., Biotechnol. Prog. 20:880-889 (2004).

[0575] In particular, a DNA vector that encodes a desired B7H3-binding polypeptide, such as a fusion protein, can be used to facilitate the methods of preparing the B7H3-binding polypeptides described herein and to obtain significant quantities. The DNA sequence can be inserted into an appropriate expression vector, i.e., a vector which contains the necessary elements for the transcription and translation of the inserted protein-coding sequence. A variety of host-vector systems may be utilized to express the protein-coding sequence. These include mammalian cell systems infected with virus (e.g., vaccinia virus, adenovirus, etc.); insect cell systems infected with virus (e.g., baculovirus); microorganisms such as yeast containing yeast vectors, or bacteria transformed with bacteriophage DNA, plasmid DNA or cosmid DNA. Depending on the host-vector system utilized, any one of a number of suitable transcription and translation elements may be used.

[0576] The disclosure also provides methods of producing a B7H3-binding polypeptide by culturing a cell under conditions that lead to expression of the polypeptide, wherein the cell comprises an isolated nucleic acid molecule encoding a B7H3-binding polypeptide described herein, and/or vectors that include these isolated nucleic acid sequences.

[0577] In some embodiments, a B7H3-binding polypeptide may be expressed in prokaryotic cells, such as bacterial cells; or in eukaryotic cells, such as fungal cells (such as yeast), plant cells, insect cells, and mammalian cells. Such expression may be carried out, for example, according to procedures known in the art. Exemplary eukaryotic cells that may be used to express polypeptides include, but are not limited to, COS cells, including COS 7 cells; 293 cells, including 293-6E cells; CHO cells, including CHO-S, DG44. Lec13 CHO cells, and FUT8 CHO cells; PER.C6® cells (Crucell); and NSO cells. In some embodiments, the B7H3-binding polypeptides may be expressed in yeast. See, e.g., U.S. Publication No. US 2006/0270045 A1. In some embodiments, a particular eukaryotic host cell is selected based on its ability to make desired post-translational modifications to the polypeptide. For example, in some embodiments, CHO cells produce polypeptides that have a higher level of sialylation than the same polypeptide produced in 293 cells.

[0578] Introduction of one or more nucleic acids (such as vectors) into a desired host cell may be accomplished by any method, including but not limited to, calcium phosphate transfection, DEAE-dextran mediated transfection, cationic lipid-mediated transfection, electroporation, transduction, infection, etc. Nonlimiting exemplary methods are described, for example, in Sambrook et al., Molecular Cloning, A Laboratory Manual, 3^{rd} ed. Cold Spring Harbor Laboratory Press (2001). Nucleic acids may be transiently or stably transfected in the desired host cells, according to any suitable method.

[0579] Host cells comprising any of the nucleic acids or vectors described herein are also provided. In some embodiments, a host cell that expresses an B7H3-binding polypeptide described herein is provided. The B7H3-binding polypeptides expressed in host cells can be purified by any suitable method. Such methods include, but are not limited to, the use of affinity matrices or hydrophobic interaction chromatography. Suitable affinity ligands include the ROR1 ECD and agents that bind Fc regions. For example, a Protein A, Protein G, Protein A/G, or an antibody affinity column may be used to bind the Fc region and to purify a B7H3-binding polypeptide that comprises an Fc region. Hydrophobic interactive chromatography, for example, a butyl or phenyl column, may also suitable for purifying some polypeptides such as antibodies. Ion exchange chromatography (for example anion exchange chromatography and/or cation exchange chromatography) may also suitable for purifying some polypeptides such as antibodies. Mixed-mode chromatography (for example reversed phase/anion exchange, reversed phase/cation exchange, hydrophilic interaction/anion exchange, hydrophilic interaction/cation exchange, etc.) may also suitable for purifying some polypeptides such as antibodies. Many methods of purifying polypeptides are known in the art.

[0580] In some embodiments, the B7H3-binding polypeptide is produced in a cell-free system. Nonlimiting exemplary cell-free systems are described, for example, in Sitaraman et al., Methods Mol. Biol. 498: 229-44 (2009); Spirin, Trends Biotechnol. 22: 538-45 (2004); Endo et al., Biotechnol. Adv. 21: 695-713 (2003).

[0581] In some embodiments, B7H3-binding polypeptides prepared by the methods described above are provided. In some embodiments, the B7H3-binding polypeptide is prepared in a host cell. In some embodiments, the B7H3-binding polypeptide is prepared in a cell-free system. In some embodiments, the B7H3-binding polypeptide is purified. In some embodiments, a cell culture media comprising an B7H3-binding polypeptide is provided.

[0582] In some embodiments, compositions comprising antibodies prepared by the methods described above are provided. In some embodiments, the composition comprises a B7H3-binding polypeptide prepared in a host cell. In some embodiments, the composition comprises a B7H3-binding polypeptide prepared in a cell-free system. In some embodiments, the composition comprises a purified B7H3-binding polypeptide.

### V. PHARMACEUTICAL COMPOSITIONS AND FORMULATIONS

[0583] Provided herein are pharmaceutical compositions containing any of the B7H3-binding polypeptides provided herein or engineered cells expressing the same. In some embodiments, B7H3-binding polypeptides, such as fusion proteins of the disclosure (also referred to herein as “active compounds”), and derivatives, fragments, analogs and homologs thereof, can be incorporated into pharmaceutical compositions suitable for administration. In some embodiments, engineered cells expressing a chimeric receptor, such as a chimeric antigen receptor, containing a B7H3-binding polypeptide provided herein can be incorporated into pharmaceutical compositions suitable for administration.

[0584] Such compositions typically contain a pharmaceutically acceptable carrier. As used herein, the term “pharmaceutically acceptable carrier” is intended to include any and all solvents, dispersion media, coatings, antibacterial and antifungal agents, isotonic and absorption delaying agents, and the like, compatible with pharmaceutical administration. Suitable carriers are described in the most recent edition of Remington's Pharmaceutical Sciences, a standard reference text in the field, which is incorporated herein by reference. Suitable examples of such carriers or diluents include, but are not limited to, water, saline, ringer's solutions, dextrose solution, and 5% human serum albumin. Liposomes and non-aqueous vehicles such as fixed oils may also be used. The use of such media and agents for pharmaceutically active substances is well known in the art. Except insofar as any conventional media or agent is incompatible with the active compound, use thereof in the compositions is contemplated. Supplementary active compounds can also be incorporated into the compositions.

[0585] A pharmaceutical composition of the disclosure is formulated to be compatible with its intended route of administration. Examples of routes of administration include parenteral, e.g., intravenous, intradermal, subcutaneous, intratumoral, oral (e.g., inhalation), transdermal (i.e., topical), transmucosal, and rectal administration. Solutions or suspensions used for parenteral, intradermal, or subcutaneous application can include the following components: a sterile diluent such as water for injection, saline solution, fixed oils, polyethylene glycols, glycerine, propylene glycol or other synthetic solvents; antibacterial agents such as benzyl alcohol or methyl parabens; antioxidants such as ascorbic acid or sodium bisulfite; chelating agents such as ethylenediaminetetraacetic acid (EDTA); buffers such as acetates, citrates or phosphates, and agents for the adjustment of tonicity such as sodium chloride or dextrose. The pH can be adjusted with acids or bases, such as hydrochloric acid or sodium hydroxide. The parenteral preparation can be enclosed in ampoules, disposable syringes or multiple dose vials made of glass or plastic.

[0586] Pharmaceutical compositions suitable for injectable use include sterile aqueous solutions (where water soluble) or dispersions and sterile powders for the extemporaneous preparation of sterile injectable solutions or dispersion. For intravenous administration, suitable carriers include physiological saline, bacteriostatic water, CREMOPHOR EL™ (BASF, Parsippany, N.J.) or phosphate buffered saline (PBS). In all cases, the composition must be sterile and should be fluid to the extent that easy syringeability exists. It must be stable under the conditions of manufacture and storage and must be preserved against the contaminating action of microorganisms such as bacteria and fungi. The carrier can be a solvent or dispersion medium containing, for example, water, ethanol, polyol (for example, glycerol, propylene glycol, and liquid polyethylene glycol, and the like), and suitable mixtures thereof. The proper fluidity can be maintained, for example, by the use of a coating such as lecithin, by the maintenance of the required particle size in the case of dispersion and by the use of surfactants. Prevention of the action of microorganisms can be achieved by various antibacterial and antifungal agents, for example, parabens, chlorobutanol, phenol, ascorbic acid, thimerosal, and the like. In many cases, it will be preferable to include isotonic agents, for example, sugars, polyalcohols such as manitol, sorbitol, sodium chloride in the composition. Prolonged absorption of the injectable compositions can be brought about by including in the composition an agent which delays absorption, for example, aluminum monostearate and gelatin.

[0587] Sterile injectable solutions can be prepared by incorporating the active compound in the required amount in an appropriate solvent with one or a combination of ingredients enumerated above, as required, followed by filtered sterilization. Generally, dispersions are prepared by incorporating the active compound into a sterile vehicle that contains a basic dispersion medium and the required other ingredients from those enumerated above. In the case of sterile powders for the preparation of sterile injectable solutions, methods of preparation are vacuum drying and freeze-drying that yields a powder of the active ingredient plus any additional desired ingredient from a previously sterile-filtered solution thereof.

[0588] Oral compositions generally include an inert diluent or an edible carrier. They can be enclosed in gelatin capsules or compressed into tablets. For the purpose of oral therapeutic administration, the active compound can be incorporated with excipients and used in the form of tablets, troches, or capsules. Oral compositions can also be prepared using a fluid carrier for use as a mouthwash, wherein the compound in the fluid carrier is applied orally and swished and expectorated or swallowed. Pharmaceutically compatible binding agents, and/or adjuvant materials can be included as part of the composition. The tablets, pills, capsules, troches and the like can contain any of the following ingredients, or compounds of a similar nature: a binder such as microcrystalline cellulose, gum tragacanth or gelatin; an excipient such as starch or lactose, a disintegrating agent such as alginic acid, Primogel, or corn starch; a lubricant such as magnesium stearate or Sterotes; a glidant such as colloidal silicon dioxide; a sweetening agent such as sucrose or saccharin; or a flavoring agent such as peppermint, methyl salicylate, or orange flavoring.

[0589] For administration by inhalation, the compounds are delivered in the form of an aerosol spray from pressured container or dispenser which contains a suitable propellant, e.g., a gas such as carbon dioxide, or a nebulizer.

[0590] Systemic administration can also be by transmucosal or transdermal means. For transmucosal or transdermal administration, penetrants appropriate to the barrier to be permeated are used in the formulation. Such penetrants are generally known in the art, and include, for example, for transmucosal administration, detergents, bile salts, and fusidic acid derivatives. Transmucosal administration can be accomplished through the use of nasal sprays or suppositories. For transdermal administration, the active compounds are formulated into ointments, salves, gels, or creams as generally known in the art.

[0591] The compounds can also be prepared in the form of suppositories (e.g., with conventional suppository bases such as cocoa butter and other glycerides) or retention enemas for rectal delivery.

[0592] In one embodiment, the active compounds are prepared with carriers that will protect the compound against rapid elimination from the body, such as a controlled release formulation, including implants and microencapsulated delivery systems. Biodegradable, biocompatible polymers can be used, such as ethylene vinyl acetate, polyanhydrides, polyglycolic acid, collagen, polyorthoesters, and polylactic acid. Methods for preparation of such formulations will be apparent to those skilled in the art. The materials can also be obtained commercially from Alza Corporation and Nova Pharmaceuticals, Inc. Liposomal suspensions can also be used as pharmaceutically acceptable carriers. These can be prepared according to methods known to those skilled in the art, for example, as described in U.S. Pat. No. 4,522,811.

[0593] It is especially advantageous to formulate oral or parenteral compositions in dosage unit form for ease of administration and uniformity of dosage. Dosage unit form as used herein refers to physically discrete units suited as unitary dosages for the subject to be treated; each unit containing a predetermined quantity of active compound calculated to produce the desired therapeutic effect in association with the required pharmaceutical carrier. The specification for the dosage unit forms of the disclosure are dictated by and directly dependent on the unique characteristics of the active compound and the particular therapeutic effect to be achieved, and the limitations inherent in the art of compounding such an active compound for the treatment of individuals.

[0594] The pharmaceutical compositions can be included in a kit, container, pack, or dispenser together with instructions for administration. These pharmaceutical compositions can be included in diagnostic kits with instructions for use.

[0595] Pharmaceutical compositions are administered in an amount effective for treatment or prophylaxis of the specific indication. The therapeutically effective amount is typically dependent on the weight of the subject being treated, his or her physical or health condition, the extensiveness of the condition to be treated, or the age of the subject being treated. In some embodiments, the pharmaceutical composition may be administered in an amount in the range of about 50 μg/kg body weight to about 50 mg/kg body weight per dose. In some embodiments, the pharmaceutical composition may be administered in an amount in the range of about 100 μg/kg body weight to about 50 mg/kg body weight per dose. In some embodiments, the pharmaceutical composition may be administered in an amount in the range of about 100 μg/kg body weight to about 20 mg/kg body weight per dose. In some embodiments, the pharmaceutical composition may be administered in an amount in the range of about 0.5 mg/kg body weight to about 20 mg/kg body weight per dose.

[0596] In some embodiments, the pharmaceutical composition may be administered in an amount in the range of about 10 mg to about 1,000 mg per dose. In some embodiments, the pharmaceutical composition may be administered in an amount in the range of about 20 mg to about 500 mg per dose. In some embodiments, the pharmaceutical composition may be administered in an amount in the range of about 20 mg to about 300 mg per dose. In some embodiments, the pharmaceutical composition may be administered in an amount in the range of about 20 mg to about 200 mg per dose.

[0597] The pharmaceutical composition may be administered as needed to subjects. In some embodiments, an effective dose of the pharmaceutical composition is administered to a subject one or more times. In various embodiments, an effective dose of the pharmaceutical composition is administered to the subject once a month, less than once a month, such as, for example, every two months, every three months, or every six months. In other embodiments, an effective dose of the pharmaceutical composition is administered more than once a month, such as, for example, every two weeks, every week, twice per week, three times per week, daily, or multiple times per day. An effective dose of the pharmaceutical composition is administered to the subject at least once. In some embodiments, the effective dose of the pharmaceutical composition may be administered multiple times, including for periods of at least a month, at least six months, or at least a year. In some embodiments, the pharmaceutical composition is administered to a subject as-needed to alleviate one or more symptoms of a condition.

### VI. METHODS OF TREATMENT AND USES

[0598] The B7H3-binding polypeptides or engineered cells expressing the same described herein are useful in a variety of therapeutic, diagnostic and prophylactic indications. For example, the B7H3-binding polypeptides or engineered cells are useful in treating a variety of diseases and disorders in a subject. Such methods and uses include therapeutic methods and uses, for example, involving administration of the molecules or engineered cells, or compositions containing the same, to a subject having a disease, condition, or disorder, such as a tumor or cancer. In some embodiments, the molecule ore engineered cell is administered in an effective amount to effect treatment of the disease or disorder. Uses include uses of molecules containing the B7H3-binding polypeptides or engineered cells in such methods and treatments, and in the preparation of a medicament in order to carry out such therapeutic methods. In some embodiments, the methods are carried out by administering the B7H3-binding polypeptides or engineered cells, or compositions comprising the same, to the subject having or suspected of having the disease or condition. In some embodiments, the methods thereby treat the disease or condition or disorder in the subject.

[0599] In one embodiment, a B7H3-binding polypeptide or engineered cell of the disclosure may be used as therapeutic agents. Such agents will generally be employed to diagnose, prognose, monitor, treat, alleviate, and/or prevent a disease or pathology in a subject. A therapeutic regimen is carried out by identifying a subject, e.g., a human patient or other mammal suffering from (or at risk of developing) a disorder using standard methods. In some cases, a subject is selected that is known, suspected or that has been identified as having a tumor expressing B7H3. A B7H3-binding polypeptide or engineered cell is administered to the subject. A B7H3-binding polypeptide or engineered cell is administered to the subject and will generally have an effect due to its binding with the target(s).

[0600] In some embodiments, a provided B7-H3 polypeptide multi-specific polypeptide construct or engineered cell is capable of modulating, e.g. increasing, an immune response when administered to a subject, such as by engagement of CD3 and/or a CD3 signal in a cell. In some embodiments, provided herein is a method of modulating an immune response in a subject by administering a therapeutically effective amount of a provided multispecific construction or engineered cell, or pharmaceutical compositions thereof. In some embodiments, the method of modulating an immune response increases or enhances an immune response in a subject. For example, the increase or enhanced response may be an increase in cell-mediated immunity In some examples, the method increases T-cell activity, such as cytolytic T-cell (CTL) activity. In some embodiments, the modulated (e.g., increased) immune response is against a tumor or cancer.

[0601] In some embodiments, administration of a B7H3-binding polypeptide, such as an B7H3-Fc fusion protein or a multispecific construction containing an Fc region, may activate innate immune cells via engagement of FcγRs through the Fc-region of the multispecific polypeptide construct. Administration of such multispecific polypeptide constructs may agonize, stimulate, activate, and/or augment innate immune cell effector functions, including ADCC, cytokine release, degranulation and/or ADCP. In the case of a constrained multispecific polypeptide construct, administration of such multispecific polypeptide constructs may activate T-cells once the linker(s) joining the first and second component is cleaved by a protease and/or upon binding of B7H3 on a target cell (e.g. tumor cell), thereby allowing the anti-CD3 binding portion to bind CD3ε on the T cells. In some cases, administration of the multispecific polypeptide constructs may agonize, stimulate, activate, and/or augment CD3-mediated T cell activation, cytotoxicity, cytokine release and/or proliferation.

[0602] In some embodiments, the provided methods are for treating a disease or condition in a subject by administering a therapeutically effective amount of any of the provided B7H3-binding polypeptides or engineered cells or pharmaceutical compositions thereof. In some embodiments, the disease or condition is a tumor or a cancer. Generally, alleviation or treatment of a disease or disorder involves the lessening of one or more symptoms or medical problems associated with the disease or disorder. For example, in the case of cancer, the therapeutically effective amount of the drug can accomplish one or a combination of the following: reduce the number of cancer cells; reduce the tumor size; inhibit (i.e., to decrease to some extent and/or stop) cancer cell infiltration into peripheral organs; inhibit tumor metastasis; inhibit, to some extent, tumor growth; and/or relieve to some extent one or more of the symptoms associated with the cancer. In some embodiments, a composition of this disclosure can be used to prevent the onset or reoccurrence of the disease or disorder in a subject, e.g., a human or other mammal, such as a non-human primate, companion animal (e.g., cat, dog, horse), farm animal, work animal, or zoo animal. The terms subject and patient are used interchangeably herein.

[0603] In some embodiments, the B7H3-binding polypeptides or engineered cells, or pharmaceutical compositions thereof, can be used to inhibit growth of mammalian cancer cells (such as human cancer cells). A method of treating cancer can include administering an effective amount of any of the pharmaceutical compositions described herein to a subject with cancer. The effective amount of the pharmaceutical composition can be administered to inhibit, halt, or reverse progression of cancers. Human cancer cells can be treated in vivo, or ex vivo. In ex vivo treatment of a human patient, tissue or fluids containing cancer cells are treated outside the body and then the tissue or fluids are reintroduced back into the patient. In some embodiments, the cancer is treated in a human patient in vivo by administration of the therapeutic composition into the patient.

[0604] Non-liming examples of disease include: all types of cancers (breast, lung, colorectal, prostate, melanomas, head and neck, pancreatic, etc.), rheumatoid arthritis, Crohn's disuse, SLE, cardiovascular damage, ischemia, etc. For example, indications would include leukemias, including T-cell acute lymphoblastic leukemia (T-ALL), lymphoblastic diseases including multiple myeloma, and solid tumors, including lung, colorectal, prostate, pancreatic, and breast, including triple negative breast cancer. For example, indications include bone disease or metastasis in cancer, regardless of primary tumor origin; breast cancer, including by way of non-limiting example, ER/PR+ breast cancer, Her2+ breast cancer, triple-negative breast cancer; colorectal cancer; endometrial cancer; gastric cancer; glioblastoma; head and neck cancer, such as esophageal cancer; lung cancer, such as by way of non-limiting example, non-small cell lung cancer; multiple myeloma ovarian cancer; pancreatic cancer; prostate cancer; sarcoma, such as osteosarcoma; renal cancer, such as by way of nonlimiting example, renal cell carcinoma; and/or skin cancer, such as by way of nonlimiting example, squamous cell cancer, basal cell carcinoma, or melanoma. In some embodiments, the cancer is a squamous cell cancer. In some embodiments, the cancer is a skin squamous cell carcinoma. In some embodiments, the cancer is an esophageal squamous cell carcinoma. In some embodiments, the cancer is a head and neck squamous cell carcinoma. In some embodiments, the cancer is a lung squamous cell carcinoma.

[0605] In some embodiments, the B7H3-binding polypeptides or engineered cells, or pharmaceutical compositions thereof, or are useful in treating, alleviating a symptom of, ameliorating and/or delaying the progression of a cancer or other neoplastic condition. In some embodiments, the cancer is bladder cancer, breast cancer, uterine/cervical cancer, ovarian cancer, prostate cancer, testicular cancer, esophageal cancer, gastrointestinal cancer, pancreatic cancer, colorectal cancer, colon cancer, kidney cancer, head and neck cancer, lung cancer, stomach cancer, germ cell cancer, bone cancer, liver cancer, thyroid cancer, skin cancer, neoplasm of the central nervous system, lymphoma, leukemia, myeloma, sarcoma, and virus-related cancer. In certain embodiments, the cancer is a metastatic cancer, refractory cancer, or recurrent cancer.

[0606] In some embodiments, a therapeutically effective amount of a B7H3-binding polypeptide, such as a fusion protein or multispecific polypeptide construct, of the disclosure relates generally to the amount needed to achieve a therapeutic objective. Typically, precise amount of the compositions of the present disclosure to be administered can be determined by a physician with consideration of individual differences in age, weight, tumor size, extent of infection or metastasis, and condition of the patient (subject).

[0607] In some embodiments, a therapeutically effective dose may be, by way of nonlimiting example, from about 0.01 μg/kg body weight to about 10 mg/kg body weight. In some embodiments, the therapeutically effective dose may be, by way of nonlimiting example, from about 0.01 mg/kg body weight to about 5-10 mg/kg body weight. Common dosing frequencies may range, for example, from twice daily to once a week.

[0608] In some embodiments, a therapeutic amount of an engineered cell composition of the present disclosure is administered. It can generally be stated that a pharmaceutical composition comprising engineered cells, e.g., T cells, as described herein may be administered at a dosage of 10⁴ to 10⁹ cells/kg body weight, such as 10⁵ to 10⁶ cells/kg body weight, including all integer values within those ranges. Engineered cell compositions, such as T cell compositions, may also be administered multiple times at these dosages. The cells can be administered by using infusion techniques that are commonly known in immunotherapy (see, e.g., Rosenberg et al, New Eng. J. of Med. 319: 1676, 1988). The optimal dosage and treatment regime for a particular patient can readily be determined by one skilled in the art of medicine by monitoring the patient for signs of disease and adjusting the treatment accordingly.

[0609] Efficaciousness of treatment is determined in association with any known method for diagnosing or treating the particular disorder. Methods for the screening of B7H3-binding polypeptides, or engineered cells containing the same, that possess the desired specificity include, but are not limited to, enzyme linked immunosorbent assay (ELISA) and other immunologically mediated techniques known within the art. A variety of means are known for determining if administration of the provided B7H3-binding polypeptides or engineered cells sufficiently modulates immunological activity by eliminating, sequestering, or inactivating immune cells mediating or capable of mediating an undesired immune response; inducing, generating, or turning on immune cells that mediate or are capable of mediating a protective immune response; changing the physical or functional properties of immune cells; or a combination of these effects. Examples of measurements of the modulation of immunological activity include, but are not limited to, examination of the presence or absence of immune cell populations (using flow cytometry, immunohistochemistry, histology, electron microscopy, polymerase chain reaction (PCR)); measurement of the functional capacity of immune cells including ability or resistance to proliferate or divide in response to a signal (such as using T-cell proliferation assays and pepscan analysis based on 3H-thymidine incorporation following stimulation with anti-CD3 antibody, anti-T-cell receptor antibody, anti-CD28 antibody, calcium ionophores, PMA (phorbol 12-myristate 13-acetate) antigen presenting cells loaded with a peptide or protein antigen; B cell proliferation assays); measurement of the ability to kill or lyse other cells (such as cytotoxic T cell assays); measurements of the cytokines, chemokines, cell surface molecules, antibodies and other products of the cells (e.g., by flow cytometry, enzyme-linked immunosorbent assays, Western blot analysis, protein microarray analysis, immunoprecipitation analysis); measurement of biochemical markers of activation of immune cells or signaling pathways within immune cells (e.g., Western blot and immunoprecipitation analysis of tyrosine, serine or threonine phosphorylation, polypeptide cleavage, and formation or dissociation of protein complexes; protein array analysis; DNA transcriptional, profiling using DNA arrays or subtractive hybridization); measurements of cell death by apoptosis, necrosis, or other mechanisms (e.g., annexin V staining, TUNEL assays, gel electrophoresis to measure DNA laddering, histology; fluorogenic caspase assays, Western blot analysis of caspase substrates); measurement of the genes, proteins, and other molecules produced by immune cells (e.g., Northern blot analysis, polymerase chain reaction, DNA microarrays, protein microarrays, 2-dimensional gel electrophoresis, Western blot analysis, enzyme linked immunosorbent assays, flow cytometry); and measurement of clinical symptoms or outcomes such as improvement of autoimmune, neurodegenerative, and other diseases involving self-proteins or self-polypeptides (clinical scores, requirements for use of additional therapies, functional status, imaging studies) for example, by measuring relapse rate or disease severity.

[0610] The provided B7H3-binding polypeptides are also useful in a variety of diagnostic and prophylactic formulations. In one embodiment, a B7H3-binding polypeptide is administered to patients that are at risk of developing one or more of the aforementioned disorders. A patient's or organ's predisposition to one or more of the disorders can be determined using genotypic, serological or biochemical markers.

[0611] In another embodiment of the disclosure, a B7H3-binding polypeptide or engineered cell is administered to human individuals diagnosed with a clinical indication associated with one or more of the aforementioned disorders. Upon diagnosis, such a therapeutic agent is administered to mitigate or reverse the effects of the clinical indication.

### Combination Therapy

[0612] B7H3-binding polypeptides or engineered cells of the present disclosure can be administered alone or in combination with other modes of treatment, such as other anti-cancer agents. They can be provided before, substantially contemporaneous with, or after other modes of treatment (i.e., concurrently or sequentially). In some embodiments, the method of treatment described herein can further include administering: radiation therapy, chemotherapy, vaccination, targeted tumor therapy, CAR-T therapy, oncolytic virus therapy, cancer immunotherapy, cytokine therapy, surgical resection, chromatin modification, ablation, cryotherapy, an antisense agent against a tumor target, a siRNA agent against a tumor target, a microRNA agent against a tumor target or an anti-cancer/tumor agent, or a biologic, such as an antibody, cytokine, or receptor extracellular domain-Fc fusion.

[0613] In some embodiments, a B7H3-binding polypeptide provided herein is given concurrently with one or more chemotherapeutic agent, CAR-T (chimeric antigen receptor T-cell) therapy, oncolytic virus therapy, cytokine therapy, and/or agents that target other checkpoint molecules, such as VISTA, gpNMB, B7H4, HHLA2, CD73, CTLA4, TIGIT, etc.

[0614] In some embodiments, the B7H3-binding polypeptide or engineered cells of the present disclosure is used in combination with other anti-tumor agents, such as anti-HER-2 antibodies, anti-CD20 antibodies, an epidermal growth factor receptor (EGFR) antagonist (e.g., a tyrosine kinase inhibitor), HER1/EGFR inhibitor (e.g., erlotinib)(TARCEVA®), platelet derived growth factor inhibitors (e.g., GLEEVEC® (Imatinib Mesylate)), a COX-2 inhibitor (e.g., celecoxib), interferons, CTLA4 inhibitors (e.g., anti-CTLA antibody ipilimumab (YERVOY®)), PD-1 inhibitors (e.g., anti-PD1 antibodies, BMS-936558), PDL1 inhibitors (e.g., anti-PDL1 antibodies, MPDL3280A), PDL2 inhibitors (e.g., anti-PDL2 antibodies), cytokines, antagonists (e.g., neutralizing antibodies) that bind to one or more of the following targets ErbB2, ErbB3, ErbB4, PDGFR-beta, BlyS, APRIL, BCMA, PD-1, PDL1, PDL2, CTLA4, or VEGF receptor(s), TRAIL/Apo2, and other bioactive and organic chemical agents, etc.

[0615] In some embodiments, a B7H3-binding polypeptide or engineered cell provided herein is given concurrently with a PD-1/PD-L1 therapy. Examples of PD-1/PD-L1 therapy include nivolumab (BMS); pidilizumab (CureTech, CT-011), pembrolizumab (Merck); durvalumab (Medimmune/AstraZeneca); atezolizumab (Genentech/Roche); avelumab (Pfizer); AMP-224 (Amplimmune); BMS-936559; AMP-514 (Amplimmune); MDX-1105 (Merck); TSR-042 (Tesaro/AnaptysBio, ANB-011); STI-A1010 (Sorrento Therapeutics); STI-A1110 (Sorrento Therapeutics); and other agents that are directed against programmed death-1 (PD-1) or programmed death ligand 1 (PD-L1).

[0616] In some embodiments, the B7H3-binding polypeptide or engineered cell of the present disclosure may be used in combination with a chemotherapeutic agent. Examples of chemotherapeutic agents include, but are not limited to, alkylating agents such as thiotepa and CYTOXAN® cyclosphosphamide; alkyl sulfonates such as busulfan, improsulfan and piposulfan; aziridines such as benzodopa, carboquone, meturedopa, and uredopa; ethylenimines and methylamelamines including altretamine, triethylenemelamine, trietylenephosphoramide, triethiylenethiophosphoramide and trimethylolomelamine; acetogenins (especially bullatacin and bullatacinone); a camptothecin (including the synthetic analogue topotecan); bryostatin; callystatin; CC-1065 (including its adozelesin, carzelesin and bizelesin synthetic analogues); cryptophycins (particularly cryptophycin 1 and cryptophycin 8); dolastatin; duocarmycin (including the synthetic analogues, KW-2189 and CB1-TM1); eleutherobin; pancratistatin; a sarcodictyin; spongistatin; nitrogen mustards such as chlorambucil, chlornaphazine, cholophosphamide, estramustine, ifosfamide, mechlorethamine, mechlorethamine oxide hydrochloride, melphalan, novembichin, phenesterine, prednimustine, trofosfamide, uracil mustard; nitrosureas such as carmustine, chlorozotocin, fotemustine, lomustine, nimustine, and ranimnustine; antibiotics such as the enediyne antibiotics (e.g., calicheamicin, especially calicheamicin gamma1I and calicheamicin omegaI1 (see, e.g., Agnew, Chem Intl. Ed. Engl., 33: 183-186 (1994)); dynemicin, including dynemicin A; bisphosphonates, such as clodronate; an esperamicin; as well as neocarzinostatin chromophore and related chromoprotein enediyne antiobiotic chromophores), aclacinomysins, actinomycin, authramycin, azaserine, bleomycins, cactinomycin, carabicin, carminomycin, carzinophilin, chromomycinis, dactinomycin, daunorubicin, detorubicin, 6-diazo-5-oxo-L-norleucine, ADRIAMYCIN® doxorubicin (including morpholino-doxorubicin, cyanomorpholino-doxorubicin, 2-pyrrolino-doxorubicin and deoxydoxorubicin), epirubicin, esorubicin, idarubicin, marcellomycin, mitomycins such as mitomycin C, mycophenolic acid, nogalamycin, olivomycins, peplomycin, potfiromycin, puromycin, quelamycin, rodorubicin, streptonigrin, streptozocin, tubercidin, ubenimex, zinostatin, zorubicin; anti-metabolites such as methotrexate and 5-fluorouracil (5-FU); folic acid analogues such as denopterin, methotrexate, pteropterin, trimetrexate; purine analogs such as fludarabine, 6-mercaptopurine, thiamiprine, thioguanine; pyrimidine analogs such as ancitabine, azacitidine, 6-azauridine, carmofur, cytarabine, dideoxyuridine, doxifluridine, enocitabine, floxuridine; androgens such as calusterone, dromostanolone propionate, epitiostanol, mepitiostane, testolactone; anti-adrenals such as aminoglutethimide, mitotane, trilostane; folic acid replenisher such as frolinic acid; aceglatone; aldophosphamide glycoside; aminolevulinic acid; eniluracil; amsacrine; bestrabucil; bisantrene; edatraxate; defofamine; demecolcine; diaziquone; elfornithine; elliptinium acetate; an epothilone; etoglucid; gallium nitrate; hydroxyurea; lentinan; lonidainine; maytansinoids such as maytansine and ansamitocins; mitoguazone; mitoxantrone; mopidanmol; nitraerine; pentostatin; phenamet; pirarubicin; losoxantrone; podophyllinic acid; 2-ethylhydrazide; procarbazine; PSK® polysaccharide complex (JHS Natural Products, Eugene, Oreg.); razoxane; rhizoxin; sizofiran; spirogermanium; tenuazonic acid; triaziquone; 2,2′,2″-trichlorotriethylamine; trichothecenes (especially T-2 toxin, verracurin A, roridin A and anguidine); urethan; vindesine; dacarbazine; mannomustine; mitobronitol; mitolactol; pipobroman; gacytosine; arabinoside (“Ara-C”); cyclophosphamide; thiotepa; taxoids, e.g., TAXOL® paclitaxel (Bristol-Myers Squibb Oncology, Princeton, N.J.), ABRAXANE® Cremophor-free, albumin-engineered nanoparticle formulation of paclitaxel (American Pharmaceutical Partners, Schaumberg, Illinois), and TAXOTERE® doxetaxel (Rhone- Poulenc Rorer, Antony, France); chloranbucil; GEMZAR® gemcitabine; 6-thioguanine; mercaptopurine; methotrexate; platinum analogs such as cisplatin, oxaliplatin and carboplatin; vinblastine; platinum; etoposide (VP-16); ifosfamide; mitoxantrone; vincristine; NAVELBINE® vinorelbine; novantrone; teniposide; edatrexate; daunomycin; aminopterin; xeloda; ibandronate; irinotecan (Camptosar, CPT-11) (including the treatment regimen of irinotecan with 5-FU and leucovorin); topoisomerase inhibitor RFS 2000; difluorometlhylornithine (DMFO); retinoids such as retinoic acid; capecitabine; combretastatin; leucovorin (LV); oxaliplatin, including the oxaliplatin treatment regimen (FOLFOX); inhibitors of PKC-alpha, Raf, H-Ras, EGFR (e.g., erlotinib)) (TARCEVA®)) and VEGF-A that reduce cell proliferation and pharmaceutically acceptable salts, acids or derivatives of any of the above.

[0617] Further nonlimiting exemplary chemotherapeutic agents include anti-hormonal agents that act to regulate or inhibit hormone action on cancers such as anti-estrogens and selective estrogen receptor modulators (SERMs), including, for example, tamoxifen (including NOLVADEX® tamoxifen), raloxifene, droloxifene, 4-hydroxytamoxifen, trioxifene, keoxifene, LY117018, onapristone, and FARESTON® toremifene; aromatase inhibitors that inhibit the enzyme aromatase, which regulates estrogen production in the adrenal glands, such as, for example, 4(5)-imidazoles, aminoglutethimide, MEGASE® megestrol acetate, AROMASIN® exemestane, formestanie, fadrozole, RIVISOR® vorozole, FEMARA® letrozole, and ARIMIDEX® anastrozole; and anti-androgens such as flutamide, nilutamide, bicalutamide, leuprolide, and goserelin; as well as troxacitabine (a 1,3-dioxolane nucleoside cytosine analog); antisense oligonucleotides, particularly those which inhibit expression of genes in signaling pathways implicated in abherant cell proliferation, such as, for example, PKC-alpha, Ralf and H-Ras; ribozymes such as a VEGF expression inhibitor (e.g., ANGIOZYME® ribozyme) and a HER2 expression inhibitor; vaccines such as gene therapy vaccines, for example, ALLOVECTIN® vaccine, LEUVECTIN® vaccine, and VAXID® vaccine; PROLEUKIN® (aldesleukin) rIL-2; LURTOTECAN® topoisomerase 1 inhibitor; ABARELIX® GnRH agoninst; and pharmaceutically acceptable salts, acids or derivatives of any of the above.

[0618] In some embodiments, the B7H3-binding polypeptide and the additional agent are formulated into a single therapeutic composition, and the B7H3-binding polypeptide and additional agent are administered simultaneously. Alternatively, the B7H3-binding polypeptide or engineered cell and the additional agent are separate from each other, e.g., each is formulated into a separate therapeutic composition, and the B7H3-binding polypeptide or engineered cell and the additional agent are administered simultaneously, or the B7H3-binding polypeptide or engineered cell and the additional agent are administered at different times during a treatment regimen. For example, the B7H3-binding polypeptide or engineered cell is administered prior to the administration of the additional agent, the B7H3-binding polypeptide or engineered cell is administered subsequent to the administration of the additional agent, or the B7H3-binding polypeptide or engineered cell and the additional agent are administered in an alternating fashion. The B7H3-binding polypeptide and additional agent may be administered in single doses or in multiple doses.

[0619] In some embodiments, the B7H3-binding polypeptide or engineered cell and the additional agent(s) are administered simultaneously. For example, the B7H3-binding polypeptide and the additional agent(s) can be formulated in a single composition or administered as two or more separate compositions. In some embodiments, the B7H3-binding polypeptide or engineered cell and the additional agent(s) are administered sequentially, or the B7H3-binding polypeptide or engineered cell and the additional agent are administered at different times during a treatment regimen.

### VII. EXEMPLARY EMBODIMENTS

[0620] Among the provided embodiments are:

[0621] 1. A B7H3-binding polypeptide construct, comprising at least one heavy chain only variable domain (B7H3 VHH domain) that specifically binds B7H3 and one or more additional binding domain that binds to a target other than B7H3.

[0622] 2. The B7H3-binding polypeptide construct of embodiment 1, wherein the at least one B7H3 VHH domain comprises a complementarity determining region 1 (CDR1) comprising an amino acid sequence selected from the group consisting of SEQ ID NO: 115, 116, 117, 118, 119, 120, 121, 122, 123, 124, 125, 126, 127, 128, 129, 130, 131, 132, 133, 134, 135, 136, 137, 138, 139, 140, 141, 142, 143, 144 and 145; a complementarity determining region 2 (CDR2) comprising an amino acid sequence selected from the group consisting of SEQ ID NO: 146, 147, 148, 149, 150, 151, 152, 153, 154, 155, 156, 157, 158, 159, 160, 161, 162, 163, 164, 165, 166 and 167; and a complementarity determining region 3 (CDR3) comprising an amino acid sequence selected from the group consisting of SEQ ID NO: 168, 169, 170, 171, 172, 173, 174, 175, 176, 177, 178, 179, 180, 181, 182, 183, 184, 185, 186, 187, 188, 189, and 483-488.

[0623] 3. A B7H3-binding polypeptide construct, comprising at least one heavy chain only variable domain (B7H3 VHH domain) comprising a complementarity determining region 1 (CDR1) comprising an amino acid sequence selected from the group consisting of SEQ ID NO: 115, 116, 117, 118, 119, 120, 121, 122, 123, 124, 125, 126, 127, 128, 129, 130, 131, 132, 133, 134, 135, 136, 137, 138, 139, 140, 141, 142, 143, 144 and 145; a complementarity determining region 2 (CDR2) comprising an amino acid sequence selected from the group consisting of SEQ ID NO: 146, 147, 148, 149, 150, 151, 152, 153, 154, 155, 156, 157, 158, 159, 160, 161, 162, 163, 164, 165, 166 and 167; and a complementarity determining region 3 (CDR3) comprising an amino acid sequence selected from the group consisting of SEQ ID NO: 168, 169, 170, 171, 172, 173, 174, 175, 176, 177, 178, 179, 180, 181, 182, 183, 184, 185, 186, 187, 188, 189, and 483-488.

[0624] 4. The B7H3-binding polypeptide construct of any of embodiments 1-3, wherein the B7H3 is a human B7H3.

[0625] 5. The B7H3-binding polypeptide construct of any of embodiments 1-4, wherein the at least one B7H3 VHH domain is humanized.

[0626] 6. The B7H3-binding polypeptide construct of any of embodiments 1, 2, 4 and 5, wherein the one or more additional binding domains binds to an activating receptor on an immune cell.

[0627] 7. The B7H3-binding polypeptide construct of embodiment 6, wherein the immune cell is a T cell.

[0628] 8. The B7H3-binding polypeptide construct of embodiment 6 or embodiment 7, wherein the activating receptor is CD3 (CD3ε).

[0629] 9. The B7H3-binding polypeptide construct of embodiment 8 that is bispecific for B7H3 and CD3.

[0630] 10. The B7H3-binding polypeptide construct of embodiment 9, wherein the immune cell is a Natural Killer (NK) cell.

[0631] 11. The B7H3-binding polypeptide construct of embodiment 6 or embodiment 10, wherein the activating receptor is CD16 (CD16a).

[0632] 12. The B7H3-binding polypeptide construct of embodiment 11 that is bispecific for B7H3 and CD16a.

[0633] 13. The B7H3-binding polypeptide construct of any of embodiments 1, 2, 4 and 5, wherein the one or more additional binding domain binds to a cytokine receptor.

[0634] 14. The B7H3-binding polypeptide construct of any of embodiments 1, 2 and 4-13, wherein the one or more additional binding domain comprises an antibody or antigen-binding fragment thereof.

[0635] 15. The B7H3-binding polypeptide construct of any of embodiments 1, 2 and 4-14, wherein the one or more additional binding domain is monovalent.

[0636] 16. The B7H3-binding polypeptide construct of embodiment 14 or embodiment 15, wherein the antibody or antigen-binding fragment thereof is an Fv, a disulfide-stabilized Fv (dsFv), scFv, a Fab, a single domain antibody (sdAb), a VNAR, or a VHH.

[0637] 17. The B7H3-binding polypeptide construct of embodiment 13, wherein the one or more additional binding domain is a cytokine or is a truncated fragment or variant thereof capable of binding to the cytokine receptor.

[0638] 18. The B7H3-binding polypeptide construct of embodiment 17, wherein the cytokine is an interferon, or is a truncated fragment or variant of an interferon.

[0639] 19. The B7H3-binding polypeptide construct of embodiment 18, wherein the interferon is a type I interferon, a type II interferon, a truncated fragment or variant of a type I interferon, or a truncated fragment of variant of a type II interferon.

[0640] 20. The B7H3-binding polypeptide construct of embodiment 19, wherein the interferon is selected from: a type I interferon that is an IFN-alpha or an IFN-beta, or is a truncated fragment or variant thereof; or a type II interferon that is an or IFN-gamma or a truncated fragment or variant thereof.

[0641] 21. The B7H3-binding polypeptide construct of any of embodiments 1-20, wherein the polypeptide construct comprises an immunoglobulin Fc region.

[0642] 22. The B7H3-binding polypeptide construct of any of embodiments 1, 2 and 4-21, wherein the polypeptide construct comprises an immunoglobulin Fc region that links the at least one B7H3 VHH domain and the one or more additional binding domain.

[0643] 23. The B7H3-binding polypeptide construct of any of embodiments 1-22 that is a dimer.

[0644] 24. The B7H3-binding polypeptide construct of any of embodiments 21-23, wherein the Fc region is a homodimeric Fc region.

[0645] 25. The B7H3-binding polypeptide construct of any of embodiments 21-24, wherein the Fc region comprises the sequence of amino acids set forth in any of SEQ ID NOS: 198, 200, 201, 202 or 203, or a sequence of amino acids that exhibits at least 85%, 86%, 87%, 88%, 89%, 90%, 91%, 92%, 93%, 94%, 95%, 96%, 97%, 98%, or 99% sequence identity to any of SEQ ID NOS: 198, 200, 201, 202 or 203.

[0646] 26. The B7H3-binding polypeptide construct of any of embodiments 21-24, wherein the Fc region is a human IgG1.

[0647] 27. The B7H3-binding polypeptide construct of embodiment 26, wherein the Fc region comprises the sequence of amino acids set forth in SEQ ID NO:198 or a sequence of amino acids that exhibits at least 85%, 86%, 87%, 88%, 89%, 90%, 91%, 92%, 93%, 94%, 95%, 96%, 97%, 98%, or 99% sequence identity to SEQ ID NO: 198.

[0648] 28. The B7H3-binding polypeptide construct of any of embodiments 21-23, wherein the Fc region is a heterodimeric Fc region.

[0649] 29. The B7H3-binding polypeptide construct of any of embodiments 21-28, wherein the Fc region exhibits effector function.

[0650] 30. The B7H3-binding polypeptide construct of any of embodiments 21-29, wherein the Fc region comprises a polypeptide comprising one or more amino acid modification that reduces effector function and/or reduces binding to an effector molecule selected from an Fc gamma receptor or C1q.

[0651] 31. The B7H3-binding polypeptide construct of embodiment 30, wherein the one or more amino acid modification is deletion of one or more of Glu233, Leu234 or Leu235.

[0652] 32. The B7H3-binding polypeptide construct of embodiment 30 or embodiment 31, wherein the Fc region comprises the sequence of amino acids set forth in SEQ ID NO:199 or a sequence of amino acids that exhibits at least 85%, 86%, 87%, 88%, 89%, 90%, 91%, 92%, 93%, 94%, 95%, 96%, 97%, 98%, or 99% sequence identity to SEQ ID NO: 199.

[0653] 33. The B7H3-binding polypeptide construct of any of embodiments 1-32, wherein the at least one B7H3 VHH domain comprises the VHH domain sequence set forth in any of SEQ ID NOS: 1, 8-35, 40, 41, 44, 56-110, 466, 467, 489, 490, or 492-518 or a sequence of amino acids that exhibits at least 85%, 86%, 87%, 88%, 89%, 90%, 91%, 92%, 93%, 94%, 95%, 96%, 97%, 98%, or 99% sequence identity to any of SEQ ID NOS: 1, 8-35, 40, 41, 44, 56-110, 466, 467, 489, 490, or 492-518 and binds B7H3.

[0654] 34. The B7H3-binding polypeptide construct of any of embodiments 1-33, wherein the at least one B7H3 VHH domain comprises the sequence set forth in (i) SEQ ID NO:1, (ii) a humanized variant of SEQ ID NO:1, or (iii) a sequence of amino acids that exhibits at least 85%, 86%, 87%, 88%, 89%, 90%, 91%, 92%, 93%, 94%, 95%, 96%, 97%, 98%, or 99% sequence identity to SEQ ID NO:1, and binds B7H3.

[0655] 35. The B7H3-binding polypeptide construct of any of embodiments 1-34, wherein the at least one B7H3 VHH domain comprises a CDR1 comprising an amino acid sequence selected from the group consisting of SEQ ID NO: 115, 116, 117, 118, 119, 120 and 121; a CDR2 comprising an amino acid sequence selected from the group consisting of SEQ ID NO: 146, 147, 148, 149, 150 and 151; and a CDR3 comprising an amino acid sequence selected from the group consisting of SEQ ID NO: 168 and 169.

[0656] 36. The B7H3-binding polypeptide construct of any of embodiments 1-35, wherein the at least one B7H3 VHH domain comprises a CDR1, CDR2 and CDR3 set forth in SEQ ID NOS: 115, 146 and 168, respectively; SEQ ID NOS: 115, 147 and 168, respectively; SEQ ID NOS: 115, 148 and 168, respectively; SEQ ID NOS: 115, 149 and 168, respectively; SEQ ID NOS: 115, 150 and 168, respectively; SEQ ID NOS: 116, 146 and 168, respectively; SEQ ID NOS: 117, 146 and 168, respectively; SEQ ID NOS: 118, 146 and 168, respectively; SEQ ID NOS: 115, 146 and 169, respectively; SEQ ID NOS: 119, 146 and 168, respectively; SEQ ID NOS: 120, 146 and 168, respectively; SEQ ID NOS: 115, 151 and 168, respectively; SEQ ID NOS: 116, 147 and 168, respectively; SEQ ID NOS: 118, 147 and 168, respectively; SEQ ID NOS: 119, 147 and 168, respectively; SEQ ID NOS: 116, 151 and 168, respectively; SEQ ID NOS: 115, 146 and 168, respectively; SEQ ID NOS: 121, 147 and 168, respectively; SEQ ID NOS: 115, 146 and 168, respectively; SEQ ID NOs: 119, 149 and 168, respectively; or SEQ ID NOS: 122, 151 and 168, respectively.

[0657] 37. The B7H3-binding polypeptide construct of any of embodiments 1-36, wherein the at least one B7H3 VHH domain comprises the sequence of amino acids set forth in any one of SEQ ID NOs:8-34, 467, 489-490, and 492-497 or a sequence of amino acids that exhibits at least 85%, 86%, 87%, 88%, 89%, 90%, 91%, 92%, 93%, 94%, 95%, 96%, 97%, 98%, or 99% sequence identity to any one of SEQ ID NO: 8-34, 467, 489-490, and 492-497, and binds B7H3.

[0658] 38. The B7H3-binding polypeptide construct of embodiments 1-37, wherein the at least one B7H3 VHH domain comprises the sequence of amino acids set forth in any one of SEQ ID NOS: 8-34, 467, 489-490, and 492-497.

[0659] 39. The B7H3-binding polypeptide construct of any of embodiments 1-33, wherein the at least one B7H3 VHH domain comprises the sequence set forth in (i) SEQ ID NO:35, (ii) a humanized variant of SEQ ID NO:35, or (iii) a sequence of amino acids that exhibits at least 85%, 86%, 87%, 88%, 89%, 90%, 91%, 92%, 93%, 94%, 95%, 96%, 97%, 98%, or 99% sequence identity to SEQ ID NO:35, and binds B7H3.

[0660] 40. The B7H3-binding polypeptide of any of embodiments 1-33 and 39, wherein the at least one B7H3 VHH domain comprises a CDR1 comprising an amino acid sequence set forth in SEQ ID NO: 123; a CDR2 comprising an amino acid sequence selected from the group consisting of SEQ ID NO: 152 and 153; and a CDR3 comprising an amino acid sequence selected from the group consisting of SEQ ID NO: 170 and 171.

[0661] 41. The B7H3-binding polypeptide construct of any of embodiments 1-33, 39 and 40, wherein the at least one B7H3 VHH domain comprises a CDR1, CDR2 and CDR3 set forth in SEQ ID NOS: 123, 152 and 170, respectively; SEQ ID NOS: 123, 152 and 171, respectively; SEQ ID NOS: 123, 153 and 170, respectively; or SEQ ID NOS: 123, 153 and 171, respectively.

[0662] 42. The B7H3-binding polypeptide construct of any of embodiments 1-33 and 39-41, wherein the at least one B7H3 VHH domain comprises the sequence of amino acids set forth in any one of SEQ ID NOs:40, 41, or 498-503 or a sequence of amino acids that exhibits at least 85%, 86%, 87%, 88%, 89%, 90%, 91%, 92%, 93%, 94%, 95%, 96%, 97%, 98%, or 99% sequence identity to any one of SEQ ID NO: 40, 41, or 498-503, and binds B7H3.

[0663] 43. The B7H3-binding polypeptide construct of embodiments 1-33 and 39-42, wherein the at least one B7H3 VHH domain comprises the sequence of amino acids set forth in any one of SEQ ID NOS: 40, 41, or 498-503.

[0664] 44. The B7H3-binding polypeptide construct of any of embodiments 1-33, wherein the at least one B7H3 VHH domain comprises the sequence set forth in (i) SEQ ID NO:44 (ii) a humanized variant of SEQ ID NO:44, or (iii) a sequence of amino acids that exhibits at least 85%, 86%, 87%, 88%, 89%, 90%, 91%, 92%, 93%, 94%, 95%, 96%, 97%, 98%, or 99% sequence identity to SEQ ID NO:44, and binds B7H3.

[0665] 45. The B7H3-binding polypeptide construct of any of embodiments 1-33 and 44, wherein the at least one B7H3 VHH domain comprises a CDR1 comprising an amino acid sequence selected from the group consisting of SEQ ID NO: 124, 125, 126, 127, 128, 129, 130, 131, 132, or 133; a CDR2 comprising an amino acid sequence set forth in SEQ ID NO: 154; and a CDR3 comprising an amino acid sequence selected from the group consisting of SEQ ID NO: 172, 173, 174, 175, 176, 177, 178, 179, 180, 181, 182 and 183.

[0666] 46. The B7H3-binding polypeptide construct of any of embodiments 1-33, 44 and 45, wherein the at least one B7H3 VHH domain comprises a CDR1, CDR2 and CDR3 set forth in SEQ ID NOS: 124, 154 and 172, respectively; SEQ ID NOS: 124, 154 and 173, respectively; SEQ ID NOS: 124, 154 and 174, respectively; SEQ ID NOS: 124, 154 and 175, respectively; SEQ ID NOS: 125, 154 and 173, respectively; SEQ ID NOS: 126, 154 and 173, respectively; SEQ ID NOS: 127, 154 and 173, respectively; SEQ ID NOS: 128, 154 and 173, respectively; SEQ ID NOS: 129, 154 and 173, respectively; SEQ ID NOS: 130, 154 and 173, respectively; SEQ ID NOS: 131, 154 and 173, respectively; SEQ ID NOS: 124, 154 and 176, respectively; SEQ ID NOS: 124, 154 and 177, respectively; SEQ ID NOS: 124, 154 and 178, respectively; SEQ ID NOS: 124, 154 and 179, respectively; SEQ ID NOS: 124, 154 and 180, respectively; SEQ ID NOS: 124, 154 and 181, respectively; SEQ ID NOS: 124, 154 and 182, respectively; SEQ ID NOS: 124, 154 and 183, respectively; SEQ ID NOS: 126, 154 and 176, respectively; SEQ ID NOS: 124, 154 and 179, respectively; SEQ ID NOS: 124, 154 and 182, respectively; SEQ ID NOS: 132, 154 and 176, respectively; or SEQ ID NOS: 133, 154 and 173, respectively.

[0667] 47. The B7H3-binding polypeptide construct of any of embodiments 1-33 and 44-46, wherein the at least one B7H3 VHH domain comprises the sequence of amino acids set forth in any one of SEQ ID NOs:56-91, 466, and 504-514 or a sequence of amino acids that exhibits at least 85%, 86%, 87%, 88%, 89%, 90%, 91%, 92%, 93%, 94%, 95%, 96%, 97%, 98%, or 99% sequence identity to any one of SEQ ID NO: 56-91, 466, and 504-514, and binds B7H3.

[0668] 48. The B7H3-binding polypeptide construct of embodiments 1-33 and 44-47, wherein the at least one B7H3 VHH domain comprises the sequence of amino acids set forth in any one of SEQ ID NOS: 56-91, 466, and 504-514.

[0669] 49. The B7H3-binding polypeptide construct of any of embodiments 1-33, wherein the at least one B7H3 VHH domain comprises the sequence set forth in (i) SEQ ID NO:105 (ii) a humanized variant of SEQ ID NO:105, or (iii) a sequence of amino acids that exhibits at least 85%, 86%, 87%, 88%, 89%, 90%, 91%, 92%, 93%, 94%, 95%, 96%, 97%, 98%, or 99% sequence identity to SEQ ID NO:105, and binds B7H3.

[0670] 50. The B7H3-binding polypeptide construct of any of embodiments 1-33 and 49, wherein the at least one B7H3 VHH domain comprises a CDR1 comprising an amino acid sequence set forth in SEQ ID NO: 145; a CDR2 comprising an amino acid sequence set forth in SEQ ID NO: 167; and a CDR3 comprising an amino acid sequence set forth in SEQ ID NO: 488.

[0671] 51. The B7H3-binding polypeptide construct of any of embodiments 1-33, 49 and 50, wherein the at least one B7H3 VHH domain comprises the sequence of amino acids set forth in any one of SEQ ID NOs:106-109 or a sequence of amino acids that exhibits at least 85%, 86%, 87%, 88%, 89%, 90%, 91%, 92%, 93%, 94%, 95%, 96%, 97%, 98%, or 99% sequence identity to any one of SEQ ID NO:106-109, and binds B7H3.

[0672] 52. The B7H3-binding polypeptide construct of embodiments 1-33 and 49-51, wherein the at least one B7H3 VHH domain comprises the sequence of amino acids set forth in any one of SEQ ID NOS: 106-109.

[0673] 53. The B7H3-binding polypeptide construct of any of embodiments 1-33, wherein the at least one B7H3 VHH domain comprises the sequence set forth in (i) SEQ ID NO:110 (ii) a humanized variant of SEQ ID NO:110, or (iii) a sequence of amino acids that exhibits at least 85%, 86%, 87%, 88%, 89%, 90%, 91%, 92%, 93%, 94%, 95%, 96%, 97%, 98%, or 99% sequence identity to SEQ ID NO:110, and binds B7H3.

[0674] 54. The B7H3-binding polypeptide of any of embodiments 1-33 and 53, wherein the at least one B7H3 VHH domain comprises a CDR1 comprising an amino acid sequence set forth in SEQ ID NO: 139; a CDR2 comprising an amino acid sequence set forth in SEQ ID NO: 161; and a CDR3 comprising an amino acid sequence set forth in SEQ ID NO: 189.

[0675] 55. The B7H3-binding polypeptide construct of any of embodiments 1-33, 53 and 54, wherein the at least one B7H3 VHH domain comprises the sequence of amino acids set forth in any one of SEQ ID NOs:515-518 or a sequence of amino acids that exhibits at least 85%, 86%, 87%, 88%, 89%, 90%, 91%, 92%, 93%, 94%, 95%, 96%, 97%, 98%, or 99% sequence identity to any one of SEQ ID NO: 515-518, and binds B7H3.

[0676] 56. The B7H3-binding polypeptide construct of embodiments 1-33 and 53-55, wherein the at least one B7H3 VHH domain comprises the sequence of amino acids set forth in any one of SEQ ID NOS: 515-518.

[0677] 57. The B7H3-binding polypeptide construct of any of embodiments 1-33, wherein the at least one B7H3 VHH domain comprises the sequence set forth in (i) SEQ ID NO:92, 93, 94, 95, 96, 97, 98, 99, 100, 101, 102, 103 or 104 (ii) a humanized variant of SEQ ID NO: 92, 93, 94, 95, 96, 97, 98, 99, 100, 101, 102, 103 or 104, or (iii) a sequence of amino acids that exhibits at least 85%, 86%, 87%, 88%, 89%, 90%, 91%, 92%, 93%, 94%, 95%, 96%, 97%, 98%, or 99% sequence identity to SEQ ID NO: 92, 93, 94, 95, 96, 97, 98, 99, 100, 101, 102, 103 or 104, and binds B7H3.

[0678] 58. The B7H3-binding polypeptide construct of any of embodiments 1-33 and 57, wherein the at least one B7H3 VHH domain comprises a CDR1, CDR2 and CDR3 set forth in SEQ ID NOS:134, 155 and 184, respectively; 135, 156 and 168, respectively; 136, 157 and 185, respectively; 137, 158 and 186, respectively; 138, 159 and 187, respectively; 138, 160 and 188, respectively; 139, 161 and 189, respectively; 140, 162 and 483, respectively; 141, 163 and 484, respectively; 139, 161 and 189, respectively; 142, 164 and 485, respectively; 143, 165 and 486, respectively; 144, 166 and 487, respectively.

[0679] 59. The B7H3-binding polypeptide construct of any of embodiments 1-33, 57 and 58, wherein the at least one B7H3 VHH domain is set forth in SEQ ID NO: 92, 93, 94, 95, 96, 97, 98, 99, 100, 101, 102, 103 or 104.

[0680] 60. A multispecific polypeptide construct, comprising: (a) a first component comprising a heterodimeric Fc region comprising a first Fc polypeptide and a second Fc polypeptide and (b) a second component comprising an anti-CD3 antibody or antigen-binding fragment comprising a variable heavy chain region (VH) and a variable light chain region (VL), wherein: the VH and VL that comprise the anti-CD3 antibody or antigen binding fragment are linked to opposite polypeptides of the heterodimeric Fc; the first and second components are coupled by a linker, wherein the heterodimeric Fc region is positioned N-terminal to the anti-CD3 antibody; and one or both of the first and second components comprises at least one antigen binding domain comprising a single domain antibody that specifically binds B7H3 (B7H3 VHH domain).

[0681] 61. The multispecific polypeptide construct of embodiment 60, wherein the multispecific polypeptide construct comprises at least (i) a first polypeptide comprising the first Fc polypeptide of the heterodimeric Fc region, the linker and the VH or VL domain of the anti-CD3 antibody or antigen binding fragment; and (ii) a second polypeptide comprising the second Fc polypeptide of the heterodimeric Fc region, the linker, optionally the same linker as present in the first polypeptide, and the other of the VH or VL domain of the anti-CD3 antibody or antigen binding fragment, wherein one or both of the first and second polypeptide comprise the at least one B7H3 VHH domain.

[0682] 62. The multispecific polypeptide construct of embodiment 60 or embodiment 61, wherein one or both of the first and second Fc polypeptides of the heterodimeric Fc region comprises at least one modification to induce heterodimerization compared to a polypeptide of a homodimeric Fc region, optionally compared to the Fc polypeptide set forth in SEQ ID NO:198 or an immunologically active fragment thereof.

[0683] 63. The multispecific polypeptide construct of embodiment 62, wherein each of the first and second Fc polypeptides of the heterodimeric Fc region independently comprise at least one amino acid modification.

[0684] 64. The multispecific polypeptide construct of embodiment 63, wherein each of the first and second Fc polypeptides of the heterodimeric Fc region comprise a knob-into-hole modification or comprise a charge mutation to increase electrostatic complementarity of the polypeptides.

[0685] 65. The multispecific polypeptide construct of embodiment 64, wherein the amino acid modification is a knob-into-hole modification.

[0686] 66. The multispecific polypeptide construct of any of embodiments 60-65, wherein the first Fc polypeptide of the heterodimeric Fc region comprises the modification selected from among Thr366Ser, Leu368Ala, Tyr407Val, and combinations thereof and the second Fc polypeptide of the heterodimeric Fc region comprises the modification Thr366Trp.

[0687] 67. The multispecific polypeptide of embodiment 66, wherein the first and second Fc polypeptides further comprises a modification of a non-cysteine residue to a cysteine residue, wherein the modification of the first polypeptide is at one of the position Ser354 and Tyr349 and the modification of the second Fc polypeptide is at the other of the position Ser354 and Tyr349.

[0688] 68. The multispecific polypeptide construct of any of embodiments 62-64, wherein the amino acid modification is a charge mutation to increase electrostatic complementarity of the polypeptides.

[0689] 69. The multispecific polypeptide construct of any of embodiments 60-64 and 68, wherein the first and/or second Fc polypeptides or each of the first and second Fc polypeptide comprise a modification in complementary positions, wherein the modification is replacement with an amino acid having an opposite charge to the complementary amino acid of the other polypeptide.

[0690] 70. The multispecific polypeptide construct of any of embodiments 60-69, wherein one of the first or second Fc polypeptide of the heterodimeric Fc region further comprises a modification at residue Ile253.

[0691] 71. The multispecific polypeptide construct of embodiment 70, wherein the modification is Ile253Arg.

[0692] 72. The multispecific polypeptide construct of any of embodiments 60-71, wherein one of the first or second Fc polypeptide of the heterodimeric Fc region further comprises a modification at residue His435.

[0693] 73. The multispecific polypeptide construct of embodiment 72, wherein the modification is His435Arg.

[0694] 74. The multispecific polypeptide construct of any of embodiments 60-73, wherein the Fc region comprises a polypeptide that lacks Lys447.

[0695] 75. The multispecific polypeptide construct of any of embodiments 60-74, wherein the Fc region comprises a polypeptide comprising at least one modification to enhance FcRn binding.

[0696] 76. The multispecific polypeptide construct of embodiment 75, wherein the modification is at one or more position selected from the group consisting of Met252, Ser254, Thr256, Met428, Asn434, and combinations thereof.

[0697] 77. The multispecific polypeptide construct of embodiment 76, wherein the modification is selected from the group consisting of Met252Y, Ser254T, Thr256E, Met428L, Met428V, Asn434S, and combinations thereof.

[0698] 78. The multispecific polypeptide construct of embodiment 75 or embodiment 76, wherein the modification is at position Met252 and at position Met428.

[0699] 79. The multispecific polypeptide construct of embodiment 78, wherein the modification is Met252Y and Met428L.

[0700] 80. The multispecific polypeptide construct of embodiment 78, wherein the modification is Met252Y and Met428V.

[0701] 81. The multispecific polypeptide construct of any of embodiments 60-80, wherein the first Fc polypeptide of the heterodimeric Fc region comprises the sequence of amino acids set forth in any of SEQ ID NOS:293, 297, 305 or 307, and the second Fc polypeptide of the heterodimeric Fc region comprises the sequence of amino acids set forth in any of SEQ ID NOS:294, 298, 301, 303, 309 or 311.

[0702] 82. The multispecific polypeptide construct of any of embodiments 21-81, wherein the Fc region comprises a polypeptide comprising at least one amino acid modification that reduces effector function and/or reduces binding to an effector molecule selected from an Fc gamma receptor or C1q.

[0703] 83. The multispecific polypeptide construct of embodiment 82, wherein the at least one amino acid modification is deletion of one or more of Glu233, Leu234 or Leu235.

[0704] 84. The multispecific polypeptide construct of any of embodiments 60-83, wherein the first Fc polypeptide of the heterodimeric Fc region comprises the sequence of amino acids set forth in any of SEQ ID NOS: 295, 299, 306 or 308 and the second Fc polypeptide of the heterodimeric Fc region comprises the sequence of amino acids set forth in any of SEQ ID NOS: 296, 300, 302, 304, 310 or 312.

[0705] 85. The multispecific polypeptide construct of any of embodiment 60-84, wherein the anti-CD3 antibody or antigen binding fragment is monovalent.

[0706] 86. The multispecific polypeptide construct of any of embodiments 60-85, wherein the anti-CD3 antibody or antigen binding fragment is not a single chain antibody, optionally is not a single chain variable fragment (scFv).

[0707] 87. The multispecific polypeptide construct of any of embodiments 60-86, wherein the anti-CD3 antibody or antigen binding fragment is an Fv antibody fragment.

[0708] 88. The multispecific polypeptide construct of embodiment 87, wherein the Fv antibody fragment comprises a disulfide stabilized anti-CD3 binding Fv fragment (dsFv).

[0709] 89. The multispecific polypeptide construct of 60-88, wherein the anti-CD3 antibody or antigen-binding fragment comprises a VH CDR1 comprising the amino acid sequence TYAMN (SEQ ID NO: 219); a VH CDR2 comprising the amino acid sequence RIRSKYNNYATYYADSVKD (SEQ ID NO: 220); a VH CDR3 comprising the amino acid sequence HGNFGNSYVSWFAY (SEQ ID NO: 221), a VL CDR1 comprising the amino acid sequence RSSTGAVTTSNYAN (SEQ ID NO: 222); a VL CDR2 comprising the amino acid sequence GTNKRAP (SEQ ID NO: 223); and a VL CDR3 comprising the amino acid sequence ALWYSNLWV (SEQ ID NO: 224).

[0710] 90. The multispecific polypeptide construct of any of embodiments 60-89, wherein the anti-CD3 antibody or antigen-binding fragment comprises: a VH having the amino acid sequence of any of SEQ ID NOS: 225-255, 480, 460, or 462 or a sequence that exhibits at least 90%, 91%, 92%, 93%, 94%, 95%, 96%, 97%, 98% or 99% sequence identity to any of SEQ ID NOS: 225-255,460, or 462 and binds CD3; and a VL having the amino acid sequence of any of SEQ ID NOS: 256-274, 417,459, or 461 or a sequence that exhibits at least 90%, 91%, 92%, 93%, 94%, 95%, 96%, 97%, 98% or 99% sequence identity to any of SEQ ID NOS: 256-274, 417,459, or 461 and binds CD3.

[0711] 91. The multispecific polypeptide construct of any of embodiments 60-90, wherein the anti-CD3 antibody or antigen-binding fragment comprises the amino acid sequence of SEQ ID NO: 237 and the amino acid sequence of SEQ ID NO: 265.

[0712] 92. The multispecific polypeptide construct of any of embodiments 60-90, wherein the anti-CD3 antibody or antigen-binding fragment comprises the amino acid sequence of SEQ ID NO: 237 and the amino acid sequence of SEQ ID NO: 417.

[0713] 93. The multispecific polypeptide construct of any of embodiments 60-90, wherein the anti-CD3 antibody or antigen-binding fragment comprises the amino acid sequence of SEQ ID NO: 460 and the amino acid sequence of SEQ ID NO: 461.

[0714] 94. The multispecific polypeptide construct of any of embodiments 60-90, wherein the anti-CD3 antibody or antigen-binding fragment comprises the amino acid sequence of SEQ ID NO: 480 and the amino acid sequence of SEQ ID NO: 459.

[0715] 95. The multispecific polypeptide construct of any of embodiment 60-94, wherein the at least one B7H3 single domain antibody is positioned amino-terminally relative to the Fc region and/or carboxy-terminally relative to the CD3 binding region of the multispecific polypeptide construct.

[0716] 96. The multispecific polypeptide construct of any of embodiments 60-95, wherein the multispecific polypeptide construct comprises a first B7H3 VHH domain that specifically bind B7H3 and a second B7H3 VHH domain that specifically binds B7H3.

[0717] 97. The multispecific polypeptide construct of embodiment 96, wherein the first or second B7H3 VHH domain is positioned amino-terminally relative to the Fc region of the multispecific construct and the other of the first or second B7H3 VHH domain is positioned carboxy-terminally relative to the CD3 binding region of the multispecific construct.

[0718] 98. The multispecific polypeptide construct of embodiment 96 or embodiment 97, wherein the first component comprises in order of N-terminus to C-terminus a first B7H3 VHH domain that binds B7H3, the first Fc polypeptide of the heterodimeric Fc region, the linker, the VH or VL domain of the anti-CD3 antibody or antigen binding fragment and a second B7H3 VHH domain that binds B7H3; and the second component comprises in order of N-terminus to C-terminus the second Fc polypeptide of the heterodimeric Fc region, the linker, optionally the same linker as present in the first component, and the other of the VH or VL domain of the anti-CD3 antibody or antigen binding fragment.

[0719] 99. The multispecific polypeptide construct of any of embodiments 96-98, wherein the first and second B7H3 VHH domain are the same.

[0720] 100. The multispecific polypeptide construct of any of embodiments 96-98, wherein the first and second B7H3 VHH domain are different.

[0721] 101. The multispecific polypeptide construct of embodiment 100, wherein the first and second B7H3 VHH domain bind a distinct or non-overlapping epitope of B7H3 and/or do not compete for binding to B7H3.

[0722] 102. The multispecific polypeptide construct of any of embodiments 60-101, wherein the at least one B7H3 VHH domain, or each of the first and second B7H3 VHH domain, independently comprises the VHH domain sequence set forth in any of SEQ ID NOS: 1, 8-35, 40, 41, 44, 56-110, 466, 467, 489, 490, or 492-518 or a sequence of amino acids that exhibits at least 85%, 86%, 87%, 88%, 89%, 90%, 91%, 92%, 93%, 94%, 95%, 96%, 97%, 98%, or 99% sequence identity to any of SEQ ID NOS: 1, 8-35, 40, 41, 44, 56-110, 466, 467, 489, 490, or 492-518 and binds B7H3.

[0723] 103. The multispecific polypeptide construct of any of embodiments 60-102, wherein the at least one B7H3 VHH domain, or each of the first and second B7H3 VHH domain, independently comprises the sequence set forth in (i) SEQ ID NO:1, (ii) a humanized variant of SEQ ID NO:1, or (iii) a sequence of amino acids that exhibits at least 85%, 86%, 87%, 88%, 89%, 90%, 91%, 92%, 93%, 94%, 95%, 96%, 97%, 98%, or 99% sequence identity to SEQ ID NO:1, and binds B7H3.

[0724] 104. The multispecific polypeptide construct of any of embodiments 60-103, wherein the at least one B7H3 VHH domain, or each of the first and second B7H3 VHH domain, independently comprises a CDR1 comprising an amino acid sequence selected from the group consisting of SEQ ID NO: 115, 116, 117, 118, 119, 120 and 121; a CDR2 comprising an amino acid sequence selected from the group consisting of SEQ ID NO: 146, 147, 148, 149, 150 and 151; and a CDR3 comprising an amino acid sequence selected from the group consisting of SEQ ID NO: 168 and 169.

[0725] 105. The multispecific polypeptide construct of any of embodiments 60-104, wherein the at least one B7H3 VHH domain, or each of the first and second B7H3 VHH domain, independently comprises a CDR1, CDR2 and CDR3 set forth in SEQ ID NOS: 115, 146 and 168, respectively; SEQ ID NOS: 115, 147 and 168, respectively; SEQ ID NOS: 115, 148 and 168, respectively; SEQ ID NOS: 115, 149 and 168, respectively; SEQ ID NOS: 115, 150 and 168, respectively; SEQ ID NOS: 116, 146 and 168, respectively; SEQ ID NOS: 117, 146 and 168, respectively; SEQ ID NOS: 118, 146 and 168, respectively; SEQ ID NOS: 115, 146 and 169, respectively; SEQ ID NOS: 119, 146 and 168, respectively; SEQ ID NOS: 120, 146 and 168, respectively; SEQ ID NOS: 115, 151 and 168, respectively; SEQ ID NOS: 116, 147 and 168, respectively; SEQ ID NOS: 118, 147 and 168, respectively; SEQ ID NOS: 119, 147 and 168, respectively; SEQ ID NOS: 116, 151 and 168, respectively; SEQ ID NOS: 115, 146 and 168, respectively; SEQ ID NOS: 121, 147 and 168, respectively; SEQ ID NOS: 115, 146 and 168, respectively; SEQ ID NOs: 119, 149 and 168, respectively; or SEQ ID NOS: 122, 151 and 168, respectively.

[0726] 106. The multispecific polypeptide construct of any of embodiments 60-105, wherein the at least one B7H3 VHH domain, or each of the first and second B7H3 VHH domain, independently comprises the sequence of amino acids set forth in any one of SEQ ID NOs: 8-34, 467, 489-490, and 492-497 or a sequence of amino acids that exhibits at least 85%, 86%, 87%, 88%, 89%, 90%, 91%, 92%, 93%, 94%, 95%, 96%, 97%, 98%, or 99% sequence identity to any one of SEQ ID NO: 8-34, 467, 489-490, and 492-497, and binds B7H3.

[0727] 107. The multispecific polypeptide construct of any of embodiments 60-106, wherein the at least one B7H3 VHH domain, or each of the first and second B7H3 VHH domain, independently comprises the sequence of amino acids set forth in any one of SEQ ID NOS: 8-34, 467, 489-490, and 492-497.

[0728] 108. The multispecific polypeptide construct of any of embodiments 60-102, wherein the at least one B7H3 VHH domain, or each of the first and second B7H3 VHH domain, independently comprises the sequence set forth in (i) SEQ ID NO:35, (ii) a humanized variant of SEQ ID NO:35, or (iii) a sequence of amino acids that exhibits at least 85%, 86%, 87%, 88%, 89%, 90%, 91%, 92%, 93%, 94%, 95%, 96%, 97%, 98%, or 99% sequence identity to SEQ ID NO:35, and binds B7H3.

[0729] 109. The multispecific polypeptide construct of any of embodiments 60-102 and 108, wherein the at least one B7H3 VHH domain, or each of the first and second B7H3 VHH domain, independently comprises a CDR1 comprising an amino acid sequence set forth in SEQ ID NO: 123; a CDR2 comprising an amino acid sequence selected from the group consisting of SEQ ID NO: 152 and 153; and a CDR3 comprising an amino acid sequence selected from the group consisting of SEQ ID NO: 170 and 171.

[0730] 110. The multispecific polypeptide construct of any of embodiments 60-102, 108 and 109, wherein the at least one B7H3 VHH domain, or each of the first and second B7H3 VHH domain, independently comprises a CDR1, CDR2 and CDR3 set forth in SEQ ID NOS: 123, 152 and 170, respectively; SEQ ID NOS: 123, 152 and 171, respectively; SEQ ID NOS: 123, 153 and 170, respectively; or SEQ ID NOS: 123, 153 and 171, respectively.

[0731] 111. The multispecific polypeptide construct of any of embodiments 60-102 and 108-110, wherein the at least one B7H3 VHH domain, or each of the first and second B7H3 VHH domain, independently comprises the sequence of amino acids set forth in any one of SEQ ID NOs: 40, 41, or 498-503 or a sequence of amino acids that exhibits at least 85%, 86%, 87%, 88%, 89%, 90%, 91%, 92%, 93%, 94%, 95%, 96%, 97%, 98%, or 99% sequence identity to any one of SEQ ID NO: 40, 41, or 498-503, and binds B7H3.

[0732] 112 The multispecific polypeptide construct of embodiments 60-102 and 108-111, wherein the at least one B7H3 VHH domain, or each of the first and second B7H3 VHH domain, independently comprises the sequence of amino acids set forth in any one of SEQ ID NOS: 40, 41, or 498-503.

[0733] 113. The multispecific polypeptide construct of any of embodiments 60-102, wherein the at least one B7H3 VHH domain, or each of the first and second B7H3 VHH domain, independently comprises the sequence set forth in (i) SEQ ID NO:44 (ii) a humanized variant of SEQ ID NO:44, or (iii) a sequence of amino acids that exhibits at least 85%, 86%, 87%, 88%, 89%, 90%, 91%, 92%, 93%, 94%, 95%, 96%, 97%, 98%, or 99% sequence identity to SEQ ID NO:44, and binds B7H3.

[0734] 114. The multispecific polypeptide construct of any of embodiments 60-102 and 113, wherein the at least one B7H3 VHH domain, or each of the first and second B7H3 VHH domain, independently comprises a CDR1 comprising an amino acid sequence selected from the group consisting of SEQ ID NO: 124, 125, 126, 127, 128, 129, 130, 131, 132, or 133; a CDR2 comprising an amino acid sequence set forth in SEQ ID NO: 154; and a CDR3 comprising an amino acid sequence selected from the group consisting of SEQ ID NO: 172, 173, 174, 175, 176, 177, 178, 179, 180, 181, 182 and 183.

[0735] 115. The multispecific polypeptide construct of any of embodiments 60-102, 113 and 114, wherein the at least one B7H3 VHH domain, or each of the first and second B7H3 VHH domain, independently comprises a CDR1, CDR2 and CDR3 set forth in SEQ ID NOS: 124, 154 and 172, respectively; SEQ ID NOS: 124, 154 and 173, respectively; SEQ ID NOS: 124, 154 and 174, respectively; SEQ ID NOS: 124, 154 and 175, respectively; SEQ ID NOS: 125, 154 and 173, respectively; SEQ ID NOS: 126, 154 and 173, respectively; SEQ ID NOS: 127, 154 and 173, respectively; SEQ ID NOS: 128, 154 and 173, respectively; SEQ ID NOS: 129, 154 and 173, respectively; SEQ ID NOS: 130, 154 and 173, respectively; SEQ ID NOS: 131, 154 and 173, respectively; SEQ ID NOS: 124, 154 and 176, respectively; SEQ ID NOS: 124, 154 and 177, respectively; SEQ ID NOS: 124, 154 and 178, respectively; SEQ ID NOS: 124, 154 and 179, respectively; SEQ ID NOS: 124, 154 and 180, respectively; SEQ ID NOS: 124, 154 and 181, respectively; SEQ ID NOS: 124, 154 and 182, respectively; SEQ ID NOS: 124, 154 and 183, respectively; SEQ ID NOS: 126, 154 and 176, respectively; SEQ ID NOS: 124, 154 and 179, respectively; SEQ ID NOS: 124, 154 and 182, respectively; SEQ ID NOS: 132, 154 and 176, respectively; or SEQ ID NOS: 133, 154 and 173, respectively.

[0736] 116. The multispecific polypeptide construct of any of embodiments 60-102 and 113-115, wherein the at least one B7H3 VHH domain, or each of the first and second B7H3 VHH domain, independently comprises the sequence of amino acids set forth in any one of SEQ ID NOs: 56-91, 466, and 504-514 or a sequence of amino acids that exhibits at least 85%, 86%, 87%, 88%, 89%, 90%, 91%, 92%, 93%, 94%, 95%, 96%, 97%, 98%, or 99% sequence identity to any one of SEQ ID NO: 56-91, 466, and 504-514, and binds B7H3.

[0737] 117. The multispecific polypeptide construct of embodiments 60-102 and 113-116, wherein the at least one B7H3 VHH domain, or each of the first and second B7H3 VHH domain, independently comprises the sequence of amino acids set forth in any one of SEQ ID NOS: 56-91, 466, and 504-514.

[0738] 118. The multispecific polypeptide construct of any of embodiments 60-102, wherein the at least one B7H3 VHH domain, or each of the first and second B7H3 VHH domain, independently comprises the sequence set forth in (i) SEQ ID NO:105 (ii) a humanized variant of SEQ ID NO:105, or (iii) a sequence of amino acids that exhibits at least 85%, 86%, 87%, 88%, 89%, 90%, 91%, 92%, 93%, 94%, 95%, 96%, 97%, 98%, or 99% sequence identity to SEQ ID NO:105, and binds B7H3.

[0739] 119 The multispecific polypeptide construct of any of embodiments 60-102 and 118, wherein the at least one B7H3 VHH domain, or each of the first and second B7H3 VHH domain, independently comprises a CDR1 comprising an amino acid sequence set forth in SEQ ID NO: 145; a CDR2 comprising an amino acid sequence set forth in SEQ ID NO: 167; and a CDR3 comprising an amino acid sequence set forth in SEQ ID NO: 488.

[0740] 120. The multispecific polypeptide construct of any of embodiments 60-102, 118 and 119, wherein the at least one B7H3 VHH domain, or each of the first and second B7H3 VHH domain, independently comprises the sequence of amino acids set forth in any one of SEQ ID NOs:106-109 or a sequence of amino acids that exhibits at least 85%, 86%, 87%, 88%, 89%, 90%, 91%, 92%, 93%, 94%, 95%, 96%, 97%, 98%, or 99% sequence identity to any one of SEQ ID NO:106-109, and binds B7H3.

[0741] 121. The multispecific polypeptide construct of any of embodiments 60-102 and 118-120, wherein the at least one B7H3 VHH domain, or each of the first and second B7H3 VHH domain, independently comprises the sequence of amino acids set forth in any one of SEQ ID NOS: 106-109.

[0742] 122. The multispecific polypeptide construct of any of embodiments 60-102, wherein the at least one B7H3 VHH domain, or each of the first and second B7H3 VHH domain, independently comprises the sequence set forth in (i) SEQ ID NO:110 (ii) a humanized variant of SEQ ID NO:110, or (iii) a sequence of amino acids that exhibits at least 85%, 86%, 87%, 88%, 89%, 90%, 91%, 92%, 93%, 94%, 95%, 96%, 97%, 98%, or 99% sequence identity to SEQ ID NO:110, and binds B7H3.

[0743] 123. The multispecific polypeptide construct of any of embodiments 60-102 and 122, wherein the at least one B7H3 VHH domain, or each of the first and second B7H3 VHH domain, independently comprises a CDR1 comprising an amino acid sequence set forth in SEQ ID NO: 139; a CDR2 comprising an amino acid sequence set forth in SEQ ID NO: 161; and a CDR3 comprising an amino acid sequence set forth in SEQ ID NO: 189.

[0744] 124. The multispecific polypeptide construct of any of embodiments 60-102, 122 and 123, wherein the at least one B7H3 VHH domain, or each of the first and second B7H3 VHH domain, independently comprises the sequence of amino acids set forth in any one of SEQ ID NOs: 515-518 or a sequence of amino acids that exhibits at least 85%, 86%, 87%, 88%, 89%, 90%, 91%, 92%, 93%, 94%, 95%, 96%, 97%, 98%, or 99% sequence identity to any one of SEQ ID NO: 515-518 and binds B7H3.

[0745] 125. The multispecific polypeptide construct of any of embodiments 60-102 and 122-124, wherein the at least one B7H3 VHH domain, or each of the first and second B7H3 VHH domain, independently comprises the sequence of amino acids set forth in any one of SEQ ID NOS: 515-518.

[0746] 126. The multispecific polypeptide construct of any of embodiments 60-102, wherein the at least one B7H3 VHH domain, or each of the first and second B7H3 VHH domain, independently comprises the sequence set forth in (i) SEQ ID NO:92, 93, 94, 95, 96, 97, 98, 99, 100, 101, 102, 103 or 104 (ii) a humanized variant of SEQ ID NO: 92, 93, 94, 95, 96, 97, 98, 99, 100, 101, 102, 103 or 104, or (iii) a sequence of amino acids that exhibits at least 85%, 86%, 87%, 88%, 89%, 90%, 91%, 92%, 93%, 94%, 95%, 96%, 97%, 98%, or 99% sequence identity to SEQ ID NO: 92, 93, 94, 95, 96, 97, 98, 99, 100, 101, 102, 103 or 104, and binds B7H3.

[0747] 127. The multispecific polypeptide construct of any of embodiments 60-102 and 126, wherein the at least one B7H3 VHH domain, or each of the first and second B7H3 VHH domain, independently comprises a CDR1, CDR2 and CDR3 set forth in SEQ ID NOS:134, 155 and 184, respectively; 135, 156 and 168, respectively; 136, 157 and 185, respectively; 137, 158 and 186, respectively; 138, 159 and 187, respectively; 138, 160 and 188, respectively; 139, 161 and 189, respectively; 140, 162 and 483, respectively; 141, 163 and 484, respectively; 139, 161 and 189, respectively; 142, 164 and 485, respectively; 143, 165 and 486, respectively; 144, 166 and 487, respectively.

[0748] 128. The multispecific polypeptide construct of any of embodiments 60-102, 126 and 127, wherein the at least one B7H3 VHH domain, or each of the first and second B7H3 VHH domain, independently is set forth in SEQ ID NO: 92, 93, 94, 95, 96, 97, 98, 99, 100, 101, 102, 103 or 104.

[0749] 129. The multispecific polypeptide construct of any of embodiments 60-128, wherein one or both of the first and second components comprises at least one co-stimulatory receptor binding region (CRBR) that binds a co-stimulatory receptor.

[0750] 130. The multispecific polypeptide construct of embodiment 129, wherein the at least one co-stimulatory receptor binding region (CRBR) is positioned amino-terminally relative to the Fc region and/or carboxy-terminally relative to the CD3 binding region of the multispecific polypeptide construct.

[0751] 131. The multispecific polypeptide construct of embodiment 129 or embodiment 130, wherein the multispecific polypeptide construct comprises only one co-stimulatory receptor binding region (CRBR).

[0752] 132. The multispecific polypeptide construct of any of embodiments 129-131, wherein:

[0753] the first component comprises in order of N-terminus to C-terminus a first B7H3 VHH domain that binds B7H3, the first Fc polypeptide of the heterodimeric Fc region, the linker, the VH or VL domain of the anti-CD3 antibody or antigen binding fragment and a second B7H3 VHH domain that binds B7H3; and the second component comprises the CRBR and comprises in order of N-terminus to C-terminus the second Fc polypeptide of the heterodimeric Fc region, the linker, optionally the same linker as present in the first component, the other of the VH or VL domain of the anti-CD3 antibody or antigen binding fragment, wherein the CRBR is positioned amino-terminally relative to the Fc region or carboxy-terminally relative to the anti-CD3 antibody or antigen binding fragment of the second component.

[0754] 133. The multispecific polypeptide construct of any of embodiments 129-132, wherein the at least one co-stimulatory receptor binding region (CRBR) is or comprises the extracellular domain or binding fragment thereof of the native cognate binding partner of the co-stimulatory receptor, or a variant thereof that exhibits binding activity to the co-stimulatory receptor.

[0755] 134. The multispecific polypeptide construct of any of embodiments 129-132, wherein the at least one co-stimulatory receptor binding region (CRBR) is an antibody or antigen-binding fragment thereof selected from the group consisting of a Fab fragment, a F(ab′)2 fragment, an Fv fragment, a scFv, a scAb, a dAb, a single domain heavy chain antibody, and a single domain light chain antibody.

[0756] 135. The multispecific polypeptide construct of embodiment 134, wherein the antibody or antigen-binding fragment thereof is a Fv, a scFv, a Fab, a single domain antibody (sdAb), a VNAR, or a VHH.

[0757] 136. The multispecific polypeptide construct of embodiment 134 or embodiment 135, wherein the antibody or antigen-binding fragment is an sdAb.

[0758] 137. The multispecific polypeptide construct of embodiment 136, wherein the sdAb is a human or humanized sdAb.

[0759] 138. The multispecific polypeptide construct of any of embodiments 129-137, wherein the at least one co-stimulatory receptor binding region (CRBR) binds a co-stimulatory receptor selected from among 41BB (CD137), OX40 (CD134), CD27, glucocorticoid-induced TNFR-related protein (GITR), CD28, ICOS, CD40, B-cell activating factor receptor (BAFF-R), B-cell maturation antigen (BCMA), Transmembrane activator and CAML interactor (TACI), and NKG2D.

[0760] 139. The multispecific polypeptide construct of any of embodiments 129-138, wherein the at least one co-stimulatory receptor binding region (CRBR) binds a co-stimulatory receptor selected from among 41BB (CD137), OX40 (CD134), and glucocorticoid-induced TNFR-related protein (GITR).

[0761] 140. The multispecific polypeptide construct of any of embodiments 129-139, wherein the at least one co-stimulatory receptor binding region (CRBR) comprises the sequence of amino acids set forth in SEQ ID NO:400 or a sequence that has at least 85%, 86%, 87%, 88%, 89%, 90%, 91%, 92%, 93%, 94%, 95%, 96%, 97%, 98%, or 99% sequence identity to the sequence set forth in SEQ ID NO:400 and binds 4-1BB.

[0762] 141. The multispecific polypeptide construct of any of embodiments 60-140, wherein one or both of the first and second components comprises at least one inhibitory receptor binding region (IRBR) that binds an inhibitory receptor.

[0763] 142. The multispecific polypeptide construct of embodiment 141, wherein the at least one inhibitory receptor binding region (IRBR) is positioned amino-terminally relative to the Fc region and/or carboxy-terminally relative to the CD3 binding region of the multispecific polypeptide construct.

[0764] 143. The multispecific polypeptide construct of embodiment 141 or embodiment 142, wherein the multispecific polypeptide construct comprises only one inhibitory receptor binding region (IRBR).

[0765] 144. The multispecific polypeptide construct of any of embodiments 141-143, wherein: the first component comprises in order of N-terminus to C-terminus a first B7H3 VHH domain that binds B7H3, the first Fc polypeptide of the heterodimeric Fc region, the linker, the VH or VL domain of the anti-CD3 antibody or antigen binding fragment and a second B7H3 VHH domain that binds B7H3; and the second component comprises the IRBR and comprises in order of N-terminus to C-terminus the second Fc polypeptide of the heterodimeric Fc region, the linker, optionally the same linker as present in the first component, the other of the VH or VL domain of the anti-CD3 antibody or antigen binding fragment, wherein the IRBR is positioned amino-terminally relative to the Fc region or carboxy-terminally relative to the anti-CD3 antibody or antigen-binding fragment of the second component.

[0766] 145. The multispecific polypeptide construct of any of embodiments 141-144, wherein the at least one IRBR is or comprises the extracellular domain or binding fragment thereof of the native cognate binding partner of the inhibitory receptor, or a variant thereof that exhibits binding activity to the inhibitory receptor.

[0767] 146. The multispecific polypeptide construct of any of embodiments 141-144, wherein the at least one IRBR is an antibody or antigen-binding fragment thereof selected from the group consisting of a Fab fragment, a F(ab′)2 fragment, an Fv fragment, a scFv, a scAb, a dAb, a single domain heavy chain antibody, and a single domain light chain antibody.

[0768] 147. The multispecific polypeptide construct of embodiment 146, wherein the antibody or antigen-binding fragment thereof is a Fv, a scFv, a Fab, a single domain antibody (sdAb), a VNAR, or a VHH.

[0769] 148. The multispecific polypeptide construct of embodiment 146 or embodiment 147, wherein the antibody or antigen-binding fragment is an sdAb.

[0770] 149. The multispecific polypeptide construct of any of embodiments 146-148, wherein the sdAb is a human or humanized sdAb.

[0771] 150. The multispecific polypeptide construct of any of embodiments 141-149, wherein the at least one IRBR binds a inhibitory receptor selected from among PD-1, CTLA-4, TIGIT, VISTA and TIM3.

[0772] 151. The multispecific polypeptide construct of any of embodiments 141-149, wherein the at least one IRBR binds PD-1.

[0773] 152. The multispecific polypeptide construct of any of embodiments 141-151, wherein: the first component comprises in order of N-terminus to C-terminus a first B7H3 VHH domain that binds B7H3, the first Fc polypeptide of the heterodimeric Fc region, the linker, the VH or VL domain of the anti-CD3 antibody or antigen binding fragment and a second B7H3 VHH domain that binds B7H3; and the second component comprises in order of N-terminus to C-terminus one of the IRBR or the CRBR, the second Fc polypeptide of the heterodimeric Fc region, the linker, optionally the same linker as present in the first component, the other of the VH or VL domain of the anti-CD3 antibody or antigen binding fragment, and the other of the CRBR or IRBR.

[0774] 153. The multispecific polypeptide construct of any of embodiments 60-152, wherein the linker is a peptide or polypeptide linker, optionally wherein the linker is 3, 4, 5, 6, 7, 8, 9, 10, 11, 12, 13, 14, 15, 16, 17, 18, 19 or 20 amino acids in length.

[0775] 154. The multispecific polypeptide construct of any of embodiments 60-153, wherein the linker is a non-cleavable linker 155. The multispecific polypeptide construct of embodiment 153, wherein the non-cleavable linker comprises GS, GGS, GGGGS (SEQ ID NO:315), GGGGGS (SEQ ID NO:316) and combinations thereof.

[0776] 156. The multispecific polypeptide construct of any of embodiments 60-155, wherein the linker is or comprises the sequence GGGGGSGGGGGSGGGGGS (SEQ ID NO:317).

[0777] 157. The multispecific polypeptide construct of any of embodiments 60-153, wherein the linker is a cleavable linker.

[0778] 158. The multispecific polypeptide construct of embodiment 157, wherein the cleavable linker is a polypeptide that functions as a substrate for a protease.

[0779] 159. The multispecific polypeptide construct of embodiment 158, wherein the protease is produced by an immune effector cell, by a tumor, or by cells present in the tumor microenvironment.

[0780] 160. The multispecific polypeptide construct of embodiment 158 or embodiment 159, wherein the protease is produced by an immune effector cell and the immune effector cell is an activated T cell, a natural killer (NK) cell, or an NK T cell.

[0781] 161. The multispecific polypeptide construct of any of embodiments 158-160, wherein the protease is selected from among matriptase, a matrix metalloprotease (MMP), granzyme B, and combinations thereof.

[0782] 162. The multispecific polypeptide construct of embodiment 161, wherein the protease is granzyme B.

[0783] 163. The multispecific polypeptide construct of any of embodiments 158-162, wherein the cleavable linker comprises the amino acid sequence GGSGGGG [symbol] IGGSGGS (SEQ ID NO:361).

[0784] 164. An isolated single domain antibody that binds B7H3, comprising a complementarity determining region 1 (CDR1) comprising an amino acid sequence selected from the group consisting of SEQ ID NO: 115, 116, 117, 118, 119, 120, 121, 122, 123, 124, 125, 126, 127, 128, 129, 130, 131, 132, 133, 134, 135, 136, 137, 138, 139, 140, 141, 142, 143, 144 and 145; a complementarity determining region 2 (CDR2) comprising an amino acid sequence selected from the group consisting of SEQ ID NO: 146, 147, 148, 149, 150, 151, 152, 153, 154, 155, 156, 157, 158, 159, 160, 161, 162, 163, 164, 165, 166 and 167; and a complementarity determining region 3 (CDR3) comprising an amino acid sequence selected from the group consisting of SEQ ID NO: 168, 169, 170, 171, 172, 173, 174, 175, 176, 177, 178, 179, 180, 181, 182, 183, 184, 185, 186, 187, 188, 189, and 483-488.

[0785] 165. The isolated single domain antibody of embodiment 164, comprising the amino acid sequence set forth in any of SEQ ID NOS: 1, 8-35, 40, 41, 44, 56-110, 466, 467, 489, 490, or 492-518, or a sequence of amino acids that exhibits at least 85%, 86%, 87%, 88%, 89%, 90%, 91%, 92%, 93%, 94%, 95%, 96%, 97%, 98%, or 99% sequence identity to any of SEQ ID NOS: 1, 8-35, 40, 41, 44, 56-110, 466, 467, 489, 490, or 492-518 , and binds B7H3.

[0786] 166. The isolated single domain antibody of embodiment 164 or embodiment 165, wherein the single domain antibody comprises the sequence set forth in (i) SEQ ID NO:1, (ii) a humanized variant of SEQ ID NO:1, or (iii) a sequence of amino acids that exhibits at least 85%, 86%, 87%, 88%, 89%, 90%, 91%, 92%, 93%, 94%, 95%, 96%, 97%, 98%, or 99% sequence identity to SEQ ID NO:1, and binds B7H3.

[0787] 167. The isolated single domain antibody of any of embodiments 164-166, wherein the sdAb comprises a CDR1 comprising an amino acid sequence selected from the group consisting of SEQ ID NO: 115, 116, 117, 118, 119, 120 and 121; a CDR2 comprising an amino acid sequence selected from the group consisting of SEQ ID NO: 146, 147, 148, 149, 150 and 151; and a CDR3 comprising an amino acid sequence selected from the group consisting of SEQ ID NO: 168 and 169.

[0788] 168. The isolated single domain antibody of any of embodiments 164-167, wherein the sdAb comprises a CDR1, CDR2 and CDR3 set forth in SEQ ID NOS: 115, 146 and 168, respectively; SEQ ID NOS: 115, 147 and 168, respectively; SEQ ID NOS: 115, 148 and 168, respectively; SEQ ID NOS: 115, 149 and 168, respectively; SEQ ID NOS: 115, 150 and 168, respectively; SEQ ID NOS: 116, 146 and 168, respectively; SEQ ID NOS: 117, 146 and 168, respectively; SEQ ID NOS: 118, 146 and 168, respectively; SEQ ID NOS: 115, 146 and 169, respectively; SEQ ID NOS: 119, 146 and 168, respectively; SEQ ID NOS: 120, 146 and 168, respectively; SEQ ID NOS: 115, 151 and 168, respectively; SEQ ID NOS: 116, 147 and 168, respectively; SEQ ID NOS: 118, 147 and 168, respectively; SEQ ID NOS: 119, 147 and 168, respectively; SEQ ID NOS: 116, 151 and 168, respectively; SEQ ID NOS: 115, 146 and 168, respectively; SEQ ID NOS: 121, 147 and 168, respectively; SEQ ID NOS: 115, 146 and 168, respectively; SEQ ID NOs: 119, 149 and 168, respectively; or SEQ ID NOS: 122, 151 and 168, respectively.

[0789] 169. The isolated single domain antibody of any of embodiments 164-168, wherein the sdAb comprises the sequence of amino acids set forth in any one of SEQ ID NOs: 8-34, 467, 489-490, and 492-497 or a sequence of amino acids that exhibits at least 85%, 86%, 87%, 88%, 89%, 90%, 91%, 92%, 93%, 94%, 95%, 96%, 97%, 98%, or 99% sequence identity to any one of SEQ ID NO: 8-34, 467, 489-490, and 492-497, and binds B7H3.

[0790] 160. The isolated single domain antibody of any of embodiments 164-169, wherein the sdAb comprises the sequence of amino acids set forth in any one of SEQ ID NOS: 8-34, 467, 489-490, and 492-497.

[0791] 171. The isolated single domain antibody of embodiment 164 or embodiment 165, wherein the sdAb comprises the sequence set forth in (i) SEQ ID NO:35, (ii) a humanized variant of SEQ ID NO:35, or (iii) a sequence of amino acids that exhibits at least 85%, 86%, 87%, 88%, 89%, 90%, 91%, 92%, 93%, 94%, 95%, 96%, 97%, 98%, or 99% sequence identity to SEQ ID NO:35, and binds B7H3.

[0792] 172. The isolated single domain antibody of any of embodiments 164, 165 and 171, wherein the sdAb comprising a CDR1 comprising an amino acid sequence set forth in SEQ ID NO: 123; a CDR2 comprising an amino acid sequence selected from the group consisting of SEQ ID NO: 152 and 153; and a CDR3 comprising an amino acid sequence selected from the group consisting of SEQ ID NO: 170 and 171.

[0793] 173. The isolated single domain antibody of any of embodiments 164, 165, 171 and 172, wherein the sdAb comprises a CDR1, CDR2 and CDR3 set forth in SEQ ID NOS: 123, 152 and 170, respectively; SEQ ID NOS: 123, 152 and 171, respectively; SEQ ID NOS: 123, 153 and 170, respectively; or SEQ ID NOS: 123, 153 and 171, respectively.

[0794] 174. The isolated single domain antibody of any of embodiments 164, 165 and 171-173, wherein the sdAb comprises the sequence of amino acids set forth in any one of SEQ ID NOs: 40, 41, or 498-503 or a sequence of amino acids that exhibits at least 85%, 86%, 87%, 88%, 89%, 90%, 91%, 92%, 93%, 94%, 95%, 96%, 97%, 98%, or 99% sequence identity to any one of SEQ ID NO: 40, 41, or 498-503, and binds B7H3.

[0795] 175. The isolated single domain antibody of any of embodiments 164, 165 and 171-174, wherein the sdAb comprises the sequence of amino acids set forth in any one of SEQ ID NOS: 40, 41, or 498-503.

[0796] 176. The isolated single domain antibody of embodiment 164 or embodiment 165, wherein the sdAb comprises the sequence set forth in (i) SEQ ID NO:44 (ii) a humanized variant of SEQ ID NO:44, or (iii) a sequence of amino acids that exhibits at least 85%, 86%, 87%, 88%, 89%, 90%, 91%, 92%, 93%, 94%, 95%, 96%, 97%, 98%, or 99% sequence identity to SEQ ID NO:44, and binds B7H3.

[0797] 177. The isolated single domain antibody of embodiment 164, embodiment 165 or embodiment 176, wherein the sdAb comprises a CDR1 comprising an amino acid sequence selected from the group consisting of SEQ ID NO: 124, 125, 126, 127, 128, 129, 130 131, 132, or 133; a CDR2 comprising an amino acid sequence set forth in SEQ ID NO: 154; and a CDR3 comprising an amino acid sequence selected from the group consisting of SEQ ID NO: 172, 173, 174, 175, 176, 177, 178, 179, 180, 181, 182 and 183.

[0798] 178. The isolated single domain antibody of any of embodiments 164, 165, 176 and 177, wherein the sdAb comprises a CDR1, CDR2 and CDR3 set forth in SEQ ID NOS: 124, 154 and 172, respectively; SEQ ID NOS: 124, 154 and 173, respectively; SEQ ID NOS: 124, 154 and 174, respectively; SEQ ID NOS: 124, 154 and 175, respectively; SEQ ID NOS: 125, 154 and 173, respectively; SEQ ID NOS: 126, 154 and 173, respectively; SEQ ID NOS: 127, 154 and 173, respectively; SEQ ID NOS: 128, 154 and 173, respectively; SEQ ID NOS: 129, 154 and 173, respectively; SEQ ID NOS: 130, 154 and 173, respectively; SEQ ID NOS: 131, 154 and 173, respectively; SEQ ID NOS: 124, 154 and 176, respectively; SEQ ID NOS: 124, 154 and 177, respectively; SEQ ID NOS: 124, 154 and 178, respectively; SEQ ID NOS: 124, 154 and 179, respectively; SEQ ID NOS: 124, 154 and 180, respectively; SEQ ID NOS: 124, 154 and 181, respectively; SEQ ID NOS: 124, 154 and 182, respectively; SEQ ID NOS: 124, 154 and 183, respectively; SEQ ID NOS: 126, 154 and 176, respectively; SEQ ID NOS: 124, 154 and 179, respectively; SEQ ID NOS: 124, 154 and 182, respectively; SEQ ID NOS: 132, 154 and 176, respectively; or SEQ ID NOS: 133, 154 and 173, respectively.

[0799] 179. The isolated single domain antibody of any of embodiments 164, 165 and 176-178, wherein the sdAb comprises the sequence of amino acids set forth in any one of SEQ ID NOs: 56-91, 466, and 504-514 or a sequence of amino acids that exhibits at least 85%, 86%, 87%, 88%, 89%, 90%, 91%, 92%, 93%, 94%, 95%, 96%, 97%, 98%, or 99% sequence identity to any one of SEQ ID NO: 56-91, 466, and 504-514, and binds B7H3.

[0800] 180. The isolated single domain antibody of any of embodiments 164, 165 and 176-179, wherein the at least one B7H3 VHH domain comprises the sequence of amino acids set forth in any one of SEQ ID NOS: 56-91, 466, and 504-514.

[0801] 181. The isolated single domain antibody of embodiment 164 or embodiment 165, wherein the sdAb comprises the sequence set forth in (i) SEQ ID NO:105 (ii) a humanized variant of SEQ ID NO:105, or (iii) a sequence of amino acids that exhibits at least 85%, 86%, 87%, 88%, 89%, 90%, 91%, 92%, 93%, 94%, 95%, 96%, 97%, 98%, or 99% sequence identity to SEQ ID NO:105, and binds B7H3.

[0802] 182. The isolated single domain antibody of embodiment 164, 165 or 181, wherein the sdAb comprising a CDR1 comprising an amino acid sequence set forth in SEQ ID NO: 145; a CDR2 comprising an amino acid sequence set forth in SEQ ID NO: 167; and a CDR3 comprising an amino acid sequence set forth in SEQ ID NO: 488.

[0803] 183. The isolated single domain antibody of any of embodiments 164, 165, 181 and 182, wherein the sdAb comprises the sequence of amino acids set forth in any one of SEQ ID NOs:106-109 or a sequence of amino acids that exhibits at least 85%, 86%, 87%, 88%, 89%, 90%, 91%, 92%, 93%, 94%, 95%, 96%, 97%, 98%, or 99% sequence identity to any one of SEQ ID NO:106-109, and binds B7H3.

[0804] 184. The isolated single domain antibody of any of embodiments 164, 165 and 181-183, wherein the sdAb comprises the sequence of amino acids set forth in any one of SEQ ID NOS: 106-109.

[0805] 185. The isolated single domain antibody of embodiment 164 or embodiment 165, wherein the sdAb comprises the sequence set forth in (i) SEQ ID NO:110 (ii) a humanized variant of SEQ ID NO:110, or (iii) a sequence of amino acids that exhibits at least 85%, 86%, 87%, 88%, 89%, 90%, 91%, 92%, 93%, 94%, 95%, 96%, 97%, 98%, or 99% sequence identity to SEQ ID NO:110, and binds B7H3.

[0806] 186. The isolated single domain antibody of any of embodiments 164, 165 and 185, wherein the sdAb comprising a CDR1 comprising an amino acid sequence set forth in SEQ ID NO: 139; a CDR2 comprising an amino acid sequence set forth in SEQ ID NO: 161; and a CDR3 comprising an amino acid sequence set forth in SEQ ID NO: 189.

[0807] 187. The isolated single domain antibody of any of embodiments 164, 165, 185 and 186, wherein the sdAb comprises the sequence of amino acids set forth in any one of SEQ ID NOs: 515-518 or a sequence of amino acids that exhibits at least 85%, 86%, 87%, 88%, 89%, 90%, 91%, 92%, 93%, 94%, 95%, 96%, 97%, 98%, or 99% sequence identity to any one of SEQ ID NO: 515-518, and binds B7H3.

[0808] 188. The isolated single domain antibody of any of embodiments 164, 165 and 185-187, wherein the sdAb comprises the sequence of amino acids set forth in any one of SEQ ID NOS: 515-518.

[0809] 189. The isolated single domain antibody of embodiment 164 or embodiment 165, wherein the sdAb comprises the sequence set forth in (i) SEQ ID NO:92, 93, 94, 95, 96, 97, 98, 99, 100, 101, 102, 103 or 104 (ii) a humanized variant of SEQ ID NO: 92, 93, 94, 95, 96, 97, 98, 99, 100, 101, 102, 103 or 104, or (iii) a sequence of amino acids that exhibits at least 85%, 86%, 87%, 88%, 89%, 90%, 91%, 92%, 93%, 94%, 95%, 96%, 97%, 98%, or 99% sequence identity to any one of SEQ ID NO: 92, 93, 94, 95, 96, 97, 98, 99, 100, 101, 102, 103 or 104, and binds B7H3.

[0810] 190. The isolated single domain antibody of any of embodiments 164, 165 and 189, wherein the at least one B7H3 VHH domain comprises a CDR1, CDR2 and CDR3 set forth in SEQ ID NOS:134, 155 and 184, respectively; 135, 156 and 168, respectively; 136, 157 and 185, respectively; 137, 158 and 186, respectively; 138, 159 and 187, respectively; 138, 160 and 188, respectively; 139, 161 and 189, respectively; 140, 162 and 483, respectively; 141, 163 and 484, respectively; 139, 161 and 189, respectively; 142, 164 and 485, respectively; 143, 165 and 486, respectively; 144, 166 and 487, respectively.

[0811] 191. A polynucleotide(s) encoding the B7H3-binding polypeptide of any of embodiments 1-59.

[0812] 192. A polynucleotide(s) encoding the multispecific polypeptide construct of any of embodiments 60-163.

[0813] 193. A polynucleotide, comprising a first nucleic acid sequence encoding a first polypeptide of a multispecific construct of any of embodiments 60-163 and a second nucleic acid sequence encoding a second polypeptide of the multispecific construct, wherein the first and second nucleic acid sequence are separated by an internal ribosome entry site (IRES), or a nucleic acid encoding a self-cleaving peptide or a peptide that causes ribosome skipping.

[0814] 194. The polynucleotide of embodiment 193, wherein the first nucleic acid sequence and second nucleic acid sequence are operably linked to the same promoter.

[0815] 195. The polynucleotide of embodiment 194, wherein the nucleic acid encoding a self-cleaving peptide or a peptide that causes ribosome skipping is selected from a T2A, a P2A, a E2A or a F2A.

[0816] 196. A polynucleotide encoding the single domain antibody of any of embodiments 164-190.

[0817] 197. A vector, comprising the polynucleotide of any of embodiments 191-196.

[0818] 198. The vector of embodiment 197 that is an expression vector.

[0819] 199. The vector of embodiment 197 or embodiment 198 that is a viral vector or a eukaryotic vector, optionally wherein the eukaryotic vector is a mammalian vector.

[0820] 200. A cell, comprising polynucleotide or polynucleotides of-any of embodiments 191-196, or a vector or vectors of any of embodiments 197-199.

[0821] 201. The cell of embodiment 200, wherein the cell is recombinant or isolated.

[0822] 202. The cell of embodiment 201, wherein the cell is a mammalian cell.

[0823] 203. A method of producing a polypeptide, the method comprising introducing into a cell a polynucleotide or polynucleotides of any of embodiments 191-196 or a vector or vectors of any of embodiments 197-199 and culturing the cell under conditions to produce the multispecific polypeptide construct.

[0824] 204. The method of embodiment 203, further comprising isolating or purifying the polypeptide from the cell.

[0825] 205. A polypeptide produced by the method of embodiment 203 or embodiment 204.

[0826] 206. An engineered immune cell, comprising a chimeric antigen receptor comprising: an extracellular domain comprising the single domain antibody of any of embodiments 164-190; a transmembrane domain; and an intracellular signaling domain.

[0827] 207. The engineered immune cell of embodiment 206, wherein the cell is a lymphocyte.

[0828] 208. The engineered immune cell of embodiment 206 or embodiment 207, wherein the cell is a T cell or a natural killer (NK) cell.

[0829] 209. The engineered immune cell of any of embodiments 206-208, wherein the intracellular signaling domain comprises an immunoreceptor tyrosine-based activation motif (ITAM) signaling domain.

[0830] 210. The engineered immune cell of any of embodiments 206-209, wherein the intracellular signaling domain is or comprises a CD3zeta signaling domain, optionally a human CD3zeta signaling domain.

[0831] 211. The engineered immune cell of embodiment 209 or embodiment 210, wherein the intracellular signaling domain further comprises a signaling domain of a costimulatory molecule.

[0832] 212. The engineered immune cell of embodiment 211, wherein the costimulatory molecule is CD28, ICOS, 41BB or OX40, optionally a human CD28, a human ICOS, a human 41BB or a human OX40.

[0833] 213. A pharmaceutical composition comprising the B7H3-binding polypeptide of any of embodiments 1-59, the multispecific polypeptide construct of any of embodiments 60-163, the single domain antibody of any of embodiments 164-190 or the engineered immune cell of any of embodiments 206-212.

[0834] 214. The pharmaceutical composition of embodiment 213, comprising a pharmaceutically acceptable carrier.

[0835] 215. The pharmaceutical composition of embodiment 213 or embodiment 214 that is sterile.

[0836] 216. A method of stimulating or inducing an immune response in a subject, the method comprising administering, to a subject in need thereof, the B7H3-binding polypeptide of any of embodiments 1-59, the multispecific polypeptide construct of any of embodiments 60-163, the single domain antibody of any of embodiments 164-190 or the engineered immune cell of any of embodiments 206-212 or a pharmaceutical composition of embodiment 213-215.

[0837] 217. The method of embodiment 216, wherein the immune response is increased against a tumor or cancer, optionally a tumor or a cancer that expresses B7H3.

[0838] 218. The method of embodiment 216 or embodiment 217, wherein the method treats a disease or condition in the subject.

[0839] 219. A method of treating a disease or condition in a subject, the method comprising administering, to a subject in need thereof, a therapeutically effective amount of the B7H3-binding polypeptide of any of embodiments 1-59, the multispecific polypeptide construct of any of embodiments 60-163, the single domain antibody of any of embodiments 164-190 or the engineered immune cell of any of embodiments 206-212 or a pharmaceutical composition of embodiment 213-215.

[0840] 220. The method of embodiment 218 or embodiment 219, wherein the disease or condition is a tumor or a cancer.

[0841] 221. The method of any of embodiments 216-220, wherein said subject is a human.

### VIII. EXAMPLES

[0842] The following examples are included for illustrative purposes only and are not intended to limit the scope of the invention.

### Example 1: Generation of B7H3 sdAb

[0843] Single domain antibodies targeting human B7H3 were generated via immunization of llamas and alpaca. Llamas and alpaca were immunized with a recombinant version of the human B7H3 extracellular domain (ECD: amino acids 29-466 of human B7H3 set forth in SEQ ID NO:190, e.g. UniProt No. Q5ZPR3) set forth as follows:

LEVQVPEDPVVALVGTDATLCCSFSPEPGFS
LAQLNLIWQLTDTKQLVHSFAEGQDQGSAYA
NRTALFPDLLAQGNASLRLQRVRVADEGSFT
CFVSIRDFGSAAVSLQVAAPYSKPSMTLEPN
KDLRPGDTVTITCSSYQGYPEAEVFWQDGQG
VPLTGNVTTSQMANEQGLFDVHSILRVVLGA
NGTYSCLVRNPVLQQDAHSSVTITPQRSPTG
AVEVQVPEDPVVALVGTDATLRCSFSPEPGF
SLAQLNLIWQLTDTKQLVHSFTEGRDQGSAY
ANRTALFPDLLAQGNASLRLQRVRVADEGSF
TCFVSIRDFGSAAVSLQVAAPYSKPSMTLEP
NKDLRPGDTVTITCSSYRGYPEAEVFWQDGQ
GVPLTGNVTTSQMANEQGLFDVHSVLRVVLG
ANGTYSCLVRNPVLQQDAHGSVTITGQPMTF
PPEA

[0844] Following the development of specific anti-B7H3 antibody titers, llama/alpaca peripheral blood mononuclear cells (PBMCs) were isolated from 500mL of blood from the immunized animal and total mRNA was isolated using the Qiagen RNeasy Maxi Kit and subsequently converted to first strand cDNA using Thermo Superscript IV Reverse Transcriptase and oligo-dT priming. Single domain antibody (sdAb; also called VHH) sequences were specifically amplified via PCR using the cDNA as template and cloned into a yeast surface display vector as sdAb-Fc-AGA2 fusion proteins. The Fc was a human IgG1 Fc (set forth in SEQ ID NO:198) or, in some cases, a variant thereof with reduced effector function (Fc xELL; SEQ ID NO:199).

[0845] Yeast libraries displaying these sdAbs were enriched using recombinant forms of the B7H3 ECD via magnetic bead isolation followed by fluorescence activated cell sorting (FACS). Sorted yeast were plated out and isolated colonies were picked into 96-well blocks and grown in media that switched the expression from surface displayed sdAb-Fc to secretion into the media. Supernatants from the 96-well yeast secretion cultures were applied to A375 cells (B7H3 positive) or CCRF-CEM cells (B7H3 negative), washed, treated with fluorophore labelled anti-human Fc secondary antibody, and analyzed by 96-well flow cytometry.

[0846] Nucleic acid sequences encoding sdAbs that bound to B7H3 positive cells and not to B7H3 negative cells were cloned in-frame with a human Fc encoding region into mammalian expression vectors and expressed by transient transfection in HEK293 freestyle cells (293F cells) or CHO cells using polyethylenimine. Supernatant was collected after 3-7 days, secreted recombinant protein was purified by protein A chromatography, and concentration was calculated from the absorbance at 280 nm and extinction coefficient.

[0847] Exemplary identified sdAbs are set forth in Table E1. In some cases, the sdAbs can include a flexible linker (e.g. GG) for linkage to another polypeptide, such as an Fc or another sdAb.

TABLE El
B7H3 sdAbs

| | | | | | | | VHH |
|---|---|---|---|---|---|---|---|
| | | SEQ | | SEQ | | SEQ | SEQ |
| Clone | | ID | | ID | | ID | ID |
| name | CDR1 | NO | CDR2 | NO | CDR3 | NO | NO |
| L1A5 | GFSFGSNVMM | 115 | TIYSSGTGTF | 146 | SGPVRGWGP | 168 | 1 |
| L57B04 | ERTFSTYTMG | 123 | VVNWSGGSKY | 152 | GGAYSGPYYDTRQYTY | 170 | 35 |
| L58E05 | GSTFSMYHMS | 124 | TSHHGGTTN | 154 | DHGYNGRGY | 172 | 44 |
| 1A10 | GLTFDEHHMG | 134 | AITWHTGTTW | 155 | GRRPFFIREVGVEPDY | 184 | 92 |
| 1E4 | GSSFGSNVMM | 135 | TINSSGTGTF | 156 | SGPVRGWGP | 168 | 93 |
| D9 | GFTFASTGMS | 136 | SINSGSDSTM | 157 | WALSCSGYGCDDLPQD | 185 | 94 |
| A3 | GFTFASYGMS | 137 | SINSGSDTSM | 158 | WALSCSQYGCDDLPRP | 186 | 95 |
| E9 | GRTFSSYAMS | 138 | TITSSGSTTY | 159 | YTSRTVRDY | 187 | 96 |
| B4 | GRTFSSYAMS | 138 | TITTGGGTTY | 160 | YTSRFPRDY | 188 | 97 |
| 57B06 | GGTFSSYAMG | 139 | AISSEGGSTY | 161 | KGVGWPQEQASYDY | 189 | 98 |
| 57B10 | GSIPSIDHMG | 140 | SIDLNGRTN | 162 | RWGSPDYYHDDVDY | 190 | 99 |
| | | | | | | 483 | |
| 58B06 | GRSFSTYAMG | 141 | AVGWRGTNTY | 163 | GEPIRVGEKSGYDY | 191 | 100 |
| | | | | | | 484 | |
| 57A12 | GGTFSSYAMG | 139 | AISSEGGSTY | 161 | KGVGWPQEQASYDY | 189 | 101 |
| 57B08 | GLTFSSYAMG | 142 | AISWSGGNTL | 164 | GPRDYFSDLEVDFGS | 192 | 102 |
| | | | | | | 485 | |
| 58A08 | GRTFSSLAVG | 143 | AISWSGGNTY | 165 | GLPIRVGVPGGYDY | 193 | 103 |
| | | | | | | 486 | |
| 57D1 | GHTFSTYAMG | 144 | GITRSGDSTH | 166 | ASFAYLSTYTHHYDY | 194 | 104 |
| | | | | | | 487 | |
| 1H5 | GRSFGDYTVG | 145 | GLSWLGGTIY | 167 | SRSAISRKATDFGS | 195 | 105 |
| | | | | | | 488 | |
| L57B06 | GGTFSSYAMG | 139 | AISSEGGSTY | 161 | KGVGWPQEQASYDY | 189 | 110 |

### Example 2: Binding of sdAb to B7H3 Expressing Cells by Flow Cytometry

[0848] Specificity and relative affinity were assessed for purified sdAb-Fcs on B7H3-expressing cells. Binding of B7H3-sdAb-Fc fusion proteins was assessed by flow cytometry using B7H3-expressing cells, lung carcinoma cell line (NCIH460), melanoma cell line (A375) or a 293 cell line transfected with B7H3 (B7H3+293). A titration series of the fusion protein was incubated with the B7H3-expressing cell lines (approx. 2.5-5×10⁴ cells/well) for 30 minutes at 4° C. in FACS Buffer (PBS 1% BSA, 0.1% NaN₃ pH 7.4) in 96 well plates. Following 3 washes with FACS buffer, an APC-conjugated anti-human Fcγ specific secondary antibody (Jackson ImmunoResearch) was added and cells were incubated for 30 minutes at 4° C. Following three additional washes in FACS buffer bound antibody was detected via flow cytometry (iQue Intellicyte).

[0849] FIGS. 1A-1F set forth results for exemplary B7H3 sdAbs, namely 1A10 (SEQ ID NO: 92), 1E4 (SEQ ID NO: 93), D9 (SEQ ID NO: 94), A3 (SEQ ID NO: 95), 57D1c (SEQ ID NO: 104), 57B10 (SEQ ID NO: 99), 58A08 (SEQ ID NO: 103), 58B06 (SEQ ID NO: 100), 58E05 (SEQ ID NO: 44), 57Al2 (SEQ ID NO: 101), 57B04 (SEQ ID NO: 35), 57B06 (SEQ ID NO: 98), and 57B08 (SEQ ID NO: 102).

### Example 3: Humanization of Camelid Derived B7H3 sdAb

[0850] Exemplary camelid derived B7H3 sdAb, L1A5(SEQ ID NO:1), L57B04 (SEQ ID NO:35), L58E05 (SEQ ID NO:44), 1H5 (SEQ ID NO:105) and L57B06 (SEQ ID NO:110), were humanized using the human VH3-23 germline as scaffold. Camelid residues that contribute to solubility, specificity, stability and/or affinity remained unmodified. In addition all humanized variants contained the modification of Leu11Glu (L11E) and the carboxy-terminal modifications of Ser112Lys (S112K) and Ser113Pro (S113P) as these are known prevent or reduce the recognition of pre-existing ADA directed toward sdAbs (as described in US20160207981).

[0851] Table E2 sets forth exemplary B7H3 sdAbs humanized variants. In some cases, the sdAbs can include a flexible linker (e.g. GG) for linkage to another polypeptide, such as an Fc or another sdAb.

TABLE E2
B7H3 sdAbs Humaized Variants

| | | | | | | | VHH |
|---|---|---|---|---|---|---|---|
| | | SEQ | | SEQ | | SEQ | SEQ |
| Clone | | ID | | ID | | ID | ID |
| name | CDR1 | NO | CDR2 | NO | CDR3 | NO | NO |
| L1A5 Humanized Variants | | | | | | | |
| hz1A5v1 | GFSFGSNVMM | 115 | TIYSSGTGTF | 146 | SGPVRGWGP | 168 | 2 |
| | | | | | | | 492 |
| hz1A5v2 | GFSFGSNVMM | 115 | TIYSSGTGTF | 146 | SGPVRGWGP | 168 | 3 |
| | | | | | | | 493 |
| hz1A5v3 | GFSFGSNVMM | 115 | TIYSSGTGTF | 146 | SGPVRGWGP | 168 | 4 |
| | | | | | | | 494 |
| hz1A5v7 | GFSFGSNVMM | 115 | TIYSSGTGTF | 146 | SGPVRGWGP | 168 | 5 |
| | | | | | | | 495 |
| hz1A5v8 | GFSFGSNVMM | 115 | TIYSSGTGTF | 146 | SGPVRGWGP | 168 | 6 |
| | | | | | | | 496 |
| hz1A5v9 | GFSFGSNVMM | 115 | TIYSRGTGTF | 147 | SGPVRGWGP | 168 | 7 |
| | | | | | | | 497 |
| hz1A5v12 | GFSFGSNVMM | 115 | TIYSSGTGTF | 146 | SGPVRGWGP | 168 | 8 |
| hz1A5v17 | GFSFGSNVMM | 115 | TIYSRGTGTF | 147 | SGPVRGWGP | 168 | 9 |
| hz1A5v24 | GFSFGSNVMM | 115 | TIYSSGTGTF | 146 | SGPVRGWGP | 168 | 10 |
| hz1A5v25 | GFSFGSNVMM | 115 | TIYSSGTGTF | 146 | SGPVRGWGP | 168 | 11 |
| hz1A5v28 | GFSFGSNVMM | 115 | TIYSSGTGTF | 146 | SGPVRGWGP | 168 | 12 |
| hz1A5v29 | GFSFGSNVMM | 115 | TIYSSGTGTF | 146 | SGPVRGWGP | 168 | 13 |
| hz1A5v30 | GFSFGSNVMM | 115 | TIYSRGGSTF | 148 | SGPVRGWGP | 168 | 14 |
| hz1A5v31 | GFSFGSNVMM | 115 | TIYSSGTGTY | 149 | SGPVRGWGP | 168 | 15 |
| hz1A5v32 | GFSFGSNVMM | 115 | TIYSRGGSTY | 150 | SGPVRGWGP | 168 | 16 |
| hz1A5v33 | GFSFGSNVMM | 115 | TIYSRGTGTF | 147 | SGPVRGWGP | 168 | 17 |
| hz1A5v34 | GFSFGSNVMM | 115 | TIYSSGTGTF | 146 | SGPVRGWGP | 168 | 18 |
| hz1A5v35 | GFSFGSYVMM | 116 | TIYSSGTGTF | 146 | SGPVRGWGP | 168 | 19 |
| hz1A5v36 | GFSFGSFVMM | 117 | TIYSSGTGTF | 146 | SGPVRGWGP | 168 | 20 |
| hz1A5v37 | GFTFGSNVMM | 118 | TIYSSGTGTF | 146 | SGPVRGWGP | 168 | 21 |
| hz1A5v38 | GFSFGSNVMM | 115 | TIYSSGTGTF | 146 | SGPVRGWGY | 169 | 22 |
| hz1A5v39 | GFSFSSNVMM | 119 | TIYSSGTGTF | 146 | SGPVRGWGP | 168 | 23 |
| hz1A5v40 | GFSFTSNVMM | 120 | TIYSSGTGTF | 146 | SGPVRGWGP | 168 | 24 |
| hz1A5v41 | GFSFGSNVMM | 115 | TIYSRGTGTF | 147 | SGPVRGWGP | 168 | 25 |
| hz1A5v42 | GFSFGSNVMM | 115 | TIYSRGTGTF | 147 | SGPVRGWGP | 168 | 26 |
| hz1A5v43 | GFSFGSNVMM | 115 | TIYSRGTGTF | 147 | SGPVRGWGP | 168 | 27 |
| hz1A5v44 | GFSFGSNVMM | 115 | TIYSRGTGTY | 151 | SGPVRGWGP | 168 | 28 |
| hz1A5v45 | GFSFGSYVMM | 116 | TIYSRGTGTF | 147 | SGPVRGWGP | 168 | 29 |
| hz1A5v46 | GFTFGSNVMM | 118 | TIYSRGTGTF | 147 | SGPVRGWGP | 168 | 30 |
| hz1A5v47 | GFSFSSNVMM | 119 | TIYSRGTGTF | 147 | SGPVRGWGP | 168 | 31 |
| hz1A5v48 | GFSFGSYVMM | 116 | TIYSRGTGTY | 151 | SGPVRGWGP | 168 | 32 |
| hz1A5v49 | GFTFSSNVMM | 121 | TIYSRGTGTF | 147 | SGPVRGWGP | 168 | 33 |
| hz1A5v50 | GFTFSSYVMM | 122 | TIYSRGTGTY | 151 | SGPVRGWGP | 168 | 34 |
| hz1A5v51 | GFSFSSNVMM | 119 | TIYSSGTGTF | 146 | SGPVRGWGP | 168 | 467 |
| hz1A5v52 | GFSFSSNVMM | 119 | TIYSSGTGTY | 149 | SGPVRGWGP | 168 | 489 |
| hz1A5v53 | GFSFGSNVMM | 115 | TIYSSGTGTF | 146 | SGPVRGWGP | 168 | 490 |
| L57B04 Humanized Variants | | | | | | | |
| hz57B04v3 | ERTFSTYTMG | 123 | VVNWSGGSKY | 152 | GGAYSGPYYDTRQYTY | 170 | 36 |
| | | | | | | | 498 |
| hz57B04v4 | ERTFSTYTMG | 123 | VVNWSGGSKY | 152 | GGAYSGPYYDTRQYTY | 170 | 37 |
| | | | | | | | 499 |
| hz57B04v8 | ERTFSTYTMG | 123 | VVNWSGGSKY | 152 | GGAYSGPYYDTRQYTY | 170 | 38 |
| | | | | | | | 500 |
| hz57B04v9 | ERTFSTYTMG | 123 | VVNWSGGSKY | 152 | GGAYSGPYYDTRQYTY | 170 | 39 |
| | | | | | | | 501 |
| hz57B04v15 | ERTFSTYTMG | 123 | VVNWGGGSKY | 153 | GGAYSGPYYDTRQYTY | 170 | 40 |
| hz57B04v20 | ERTFSTYTMG | 123 | VVNWGGGSKY | 153 | GGAYSTPYYDTRQYTY | 171 | 41 |
| hz57B04v23 | ERTFSTYTMG | 123 | VVNWSGGSKY | 152 | GGAYSGPYYDTRQYTY | 170 | 42 |
| | | | | | | | 502 |
| hz57B04v24 | ERTFSTYTMG | 123 | VVNWGGGSKY | 153 | GGAYSGPYYDTRQYTY | 170 | 43 |
| | | | | | | | 503 |
| L58E05 Humanized Variants | | | | | | | |
| hz58E05v1 | GSTFSMYHMS | 124 | TSHHGGTTN | 154 | DHGYNGRGY | 172 | 45 |
| | | | | | | | 504 |
| hz58E05v2 | GSTFSMYHMS | 124 | TSHHGGTTN | 154 | DHGYNGRGY | 172 | 46 |
| | | | | | | | 505 |
| hz58E05v3 | GSTFSMYHMS | 124 | TSHHGGTTN | 154 | DHGYNGRGY | 172 | 47 |
| | | | | | | | 506 |
| hz58E05v4 | GSTFSMYHMS | 124 | TSHHGGTTN | 154 | DHGYNGRGY | 172 | 48 |
| | | | | | | | 507 |
| hz58E05v5 | GSTFSMYHMS | 124 | TSHHGGTTN | 154 | DHGYQGRGY | 173 | 49 |
| | | | | | | | 508 |
| hz58E05v6 | GSTFSMYHMS | 124 | TSHHGGTTN | 154 | DHGYNARGY | 174 | 50 |
| | | | | | | | 509 |
| hz58E05v7 | GSTFSMYHMS | 124 | TSHHGGTTN | 154 | DHGYNTRGY | 175 | 51 |
| | | | | | | | 510 |
| hz58E05v8 | GSTFSMYHMS | 124 | TSHHGGTTN | 154 | DHGYNGRGY | 172 | 52 |
| | | | | | | | 511 |
| hz58E05v9 | GSTFSMYHMS | 124 | TSHHGGTTN | 154 | DHGYQGRGY | 173 | 53 |
| | | | | | | | 512 |
| hz58E05v10 | GSTFSMYHMS | 124 | TSHHGGTTN | 154 | DHGYNARGY | 174 | 54 |
| | | | | | | | 513 |
| hz58E05v11 | GSTFSMYHMS | 124 | TSHHGGTTN | 154 | DHGYNTRGY | 175 | 55 |
| | | | | | | | 514 |
| hz58E05v13 | GSTFSMYHMS | 124 | TSHHGGTTN | 154 | DHGYQGRGY | 173 | 56 |
| hz58E05v16 | GSTFSLYHMS | 125 | TSHHGGTTN | 154 | DHGYQGRGY | 173 | 57 |
| hz58E05v18 | GSTFSSYHMS | 126 | TSHHGGTTN | 154 | DHGYQGRGY | 173 | 58 |
| hz58E05v19 | GSTFSMYHMS | 124 | TSHHGGTTN | 154 | DHGYQGRGY | 173 | 59 |
| hz58E05v20 | GSTFSTYHMS | 127 | TSHHGGTTN | 154 | DHGYQGRGY | 173 | 60 |
| hz58E05v21 | GSTFSKYHMS | 128 | TSHHGGTTN | 154 | DHGYQGRGY | 173 | 61 |
| hz58E05v22 | GSTFSFYHMS | 129 | TSHHGGTTN | 154 | DHGYQGRGY | 173 | 62 |
| hz58E05v23 | GSTFSDYHMS | 130 | TSHHGGTTN | 154 | DHGYQGRGY | 173 | 63 |
| hz58E05v24 | GSTFSRYHMS | 131 | TSHHGGTTN | 154 | DHGYQGRGY | 173 | 64 |
| hz58E05v25 | GSTFSMYHMS | 124 | TSHHGGTTN | 154 | DHGYQGRGY | 173 | 65 |
| hz58E05v26 | GSTFSMYHMS | 124 | TSHHGGTTN | 154 | DHGYQGRGY | 173 | 66 |
| hz58E05v27 | GSTFSSYHMS | 126 | TSHHGGTTN | 154 | DHGYQGRGY | 173 | 67 |
| hz58E05v28 | GSTFSMYHMS | 124 | TSHHGGTTN | 154 | DHGYNGRGY | 172 | 68 |
| hz58E05v29 | GSTFSMYHMS | 124 | TSHHGGTTN | 154 | DHGYNGRGY | 172 | 69 |
| hz58E05v30 | GSTFSMYHMS | 124 | TSHHGGTTN | 154 | DHGYNGRGY | 172 | 70 |
| hz58E05v31 | GSTFSMYHMS | 124 | TSHHGGTTN | 154 | DHGYQGRGY | 173 | 71 |
| hz58E05v32 | GSTFSSYHMS | 126 | TSHHGGTTN | 154 | DHGYQGRGY | 173 | 72 |
| hz58E05v36 | GSTFSMYHMS | 124 | TSHHGGTTN | 154 | DHGYGGRGY | 176 | 73 |
| hz58E05v37 | GSTFSMYHMS | 124 | TSHHGGTTN | 154 | DHGYSGRGY | 177 | 74 |
| hz58E05v38 | GSTFSMYHMS | 124 | TSHHGGTTN | 154 | DHGYVGRGY | 178 | 75 |
| hz58E05v39 | GSTFSMYHMS | 124 | TSHHGGTTN | 154 | DHGYEGRGY | 179 | 76 |
| hz58E05v40 | GSTFSMYHMS | 124 | TSHHGGTTN | 154 | DHGYNPRGY | 180 | 77 |
| hz58E05v41 | GSTFSMYHMS | 124 | TSHHGGTTN | 154 | DHGYGNRGY | 181 | 78 |
| hz58E05v42 | GSTFSMYHMS | 124 | TSHHGGTTN | 154 | DHGNYGRGY | 182 | 79 |
| hz58E05v43 | GSTFSMYHMS | 124 | TSHHGGTTN | 154 | DHGYNRGGY | 183 | 80 |
| hz58E05v44 | GSTFSSYHMS | 126 | TSHHGGTTN | 154 | DHGYGGRGY | 176 | 81 |
| hz58E05v45 | GSTFSSYHMS | 126 | TSHHGGTTN | 154 | DHGYEGRGY | 179 | 82 |
| hz58E05v46 | GSTFSSYHMS | 126 | TSHHGGTTN | 154 | DHGNYGRGY | 182 | 83 |
| hz58E05v47 | GSTFSIYHMS | 132 | TSHHGGTTN | 154 | DHGYGGRGY | 176 | 84 |
| hz58E05v48 | GFTFSSYHMS | 133 | TSHHGGTTN | 154 | DHGYQGRGY | 173 | 85 |
| hz58E05v49 | GSTFSSYHMS | 126 | TSHHGGTTN | 154 | DHGYQGRGY | 173 | 86 |
| hz58E05v50 | GSTFSSYHMS | 126 | TSHHGGTTN | 154 | DHGYQGRGY | 173 | 87 |
| hz58E05v51 | GSTFSSYHMS | 126 | TSHHGGTTN | 154 | DHGYQGRGY | 173 | 88 |
| hz58E05v52 | GSTFSSYHMS | 126 | TSHHGGTTN | 154 | DHGYQGRGY | 173 | 89 |
| hz58E05v53 | GSTFSSYHMS | 126 | TSHHGGTTN | 154 | DHGYQGRGY | 173 | 90 |
| hz58E05v54 | GSTFSSYHMS | 126 | TSHHGGTTN | 154 | DHGYQGRGY | 173 | 91 |
| hz58E05v55 | GFTFSSYHMS | 126 | TSHHGGTTN | 154 | DHGYQGRGY | 173 | 466 |
| IH5 Humanized Variants | | | | | | | |
| hz1H5v1 | GRSFGDYTVG | 145 | GLSWLGGTIY | 167 | SRSAISRKATDFGS | 488 | 106 |
| hz1H5v2 | GRSFGDYTVG | 145 | GLSWLGGTIY | 167 | SRSAISRKATDFGS | 488 | 107 |
| hz1H5v3 | GRSFGDYTVG | 145 | GLSWLGGTIY | 167 | SRSAISRKATDFGS | 488 | 108 |
| hz1H5v4 | GRSFGDYTVG | 145 | GLSWLGGTIY | 167 | SRSAISRKATDFGS | 488 | 109 |
| L57B06 Humanized Variants | | | | | | | |
| h57B06v5 | GGTFSSYAMG | 139 | AISSEGGSTY | 161 | KGVGWPQEQASYDY | 189 | 111 |
| | | | | | | | 515 |
| h57B06v6 | GGTFSSYAMG | 139 | AISSEGGSTY | 161 | KGVGWPQEQASYDY | 189 | 112 |
| | | | | | | | 516 |
| h57B06v7 | GGTFSSYAMG | 139 | AISSEGGSTY | 161 | KGVGWPQEQASYDY | 189 | 113 |
| | | | | | | | 517 |
| h57B06v8 | GGTFSSYAMG | 139 | AISSEGGSTY | 161 | KGVGWPQEQASYDY | 189 | 114 |
| | | | | | | | 518 |

[0852] Humanized variants of the B7H3 sdAbs were tested for their ability to bind B7H3 expressing cells substantially as described in Example 2, and binding was compared to the parental sdAb in most cases. In some cases, HCT-116 or A549 cell lines, which both endogenously express B7H3, were used in these studies. Results are shown in FIGS. 2A-2Y, which confirm binding of the humanized variants.

### Example 4: Method of Producing B7H3-Targeted Constrained CD3 Binding Proteins

[0853] Multispecific polypeptide constructs were generated containing a disulfide stabilized anti-CD3 Fv binding region that exhibits constrained CD3 binding, a heterodimeric Fc domain, and one or more B7H3 sdAb described above positioned amino-terminally relative to the Fc region and/or carboxy-terminally relative to the CD3 binding region. The multispecific constructs were generated in various configurations, as shown in FIG. 3A-3E. In some cases, the multispecific polypeptide constructs contained at least one co-stimulatory receptor binding region (CRBR) positioned amino-terminally relative to the Fc region and/or carboxy-terminally relative to the CD3 binding region. An exemplary CRBR is a sdAb targeting a 4-1BB co-stimulatory receptor (e.g. containing a CDR1, a CDR2 and a CDR3 set forth in SEQ ID Nos: 468, 469 and 470, respectively; e.g. set forth in SEQ ID NO:400).

[0854] In the exemplary constructs, polynucleotides encoding at least a first polypeptide chain and a second polypeptide chain of the heterodimeric multispecific polypeptide construct were generated and cloned into a plasmid for expression. The first polypeptide chain generally included in order, from the N-terminus to C-terminus, an Fc hole polypeptide (e.g. set forth in SEQ ID NO:302, or in some cases SEQ ID NO:304); a cleavable or a non-cleavable linker, such as one containing one or more substrate recognition sites for a protease; and a variable light (VL) domain of a dsFv anti-CD3 antibody (e.g. set forth in SEQ ID NO:417). The second polypeptide chain generally included in order, from the N-terminus to C-terminus, an Fc knob polypeptide (e.g. set forth in SEQ ID NO: 295, or in some cases SEQ ID NO:299); the same cleavable linker or the same non-cleavable linker as the first polypeptide chain; and a variable heavy domain of a dsFv anti-CD3 antibody (e.g. set forth in SEQ ID NO:237). The constructs were generated with the exemplary non-cleavable linker, GGGGGSGGGGGSGGGGGS (SEQ ID NO:317), or the exemplary cleavable linker, GGSGGGG [symbol] IGGSGGS (SEQ ID NO:361) containing a substrate recognition site for granzyme B. One or both of the polypeptide chains additionally encoded one or more B7H3 sdAb amino terminal to the Fc domain and/or carboxy terminal to the CD3 binding region, and/or a co-stimulatory receptor binding domain amino terminal to the Fc domain and/or carboxy terminal to the CD3 binding region, in various configurations.

[0855] Separate plasmids encoding each chain of a heterodimeric constrained CD3 binding protein were transiently transfected at an equimolar ratio into mammalian cells (either HEK293 or CHO) using polyethylenimine. Supernatant was collected after 3-7 days, and secreted recombinant protein was purified by protein A chromatography, followed by either preparative size exclusion chromatography (SEC) or flow-through hydrophobic interaction chromatography (HIC). Heterodimeric protein was selectively purified owing to a mutation designed into one chain of the heterodimeric Fc at position I253R or H435R (usually the hole-Fc) such that it did not bind protein A. The second chromatography step on SEC (AKTA with Superdex-200 resin) or FT-HIC (AKTA with butyl/phenyl sepharose) was used to remove undesired cross-paired species containing two heterodimeric Fcs that were more hydrophobic and twice the expected molecular weight.

[0856] The method favored production of heterodimeric multispecific polypeptide constructs, containing properly paired species of heterodimeric Fc and the disulfide stabilized anti-CD3 Fv as described (e.g. anti-CD3 VH with the mutation G44C as set forth in SEQ ID NO: 237 and VL with the mutation G100C as set forth in SEQ ID NO: 417). Purified heterodimeric constrained CD3 binding protein was stable and did not accumulate cross-paired species upon prolonged incubation at 4° C. or increased protein concentration.

[0857] Table E3 sets forth exemplary generated constrained multispecific constructs:

TABLE E3
B7H3 VHH Constrained Multispecific Constructs

| | | N-term sdAb | | | | C-term sdAb |
|---|---|---|---|---|---|---|
| Construct | | (B7H3) | | | CD3 Binding | (B7H3) |
| # | Chain | (SEQ ID NO) | Fc | Linker | Domain | (SEQ ID NO) |
| cx2846 | 1 | 58E05v27 | hFc-Knob | IEPDI | Con1 VH | 57B04v24 |
| | | (67) | | | | (503, e.g. 43) |
| | 2 | — | hFc-Hole | IEPDI | Con1 VL | — |
| cx3072 | 1 | 58E05v27 | hFc-Knob | (G5S)3 | Con1 VH | 57B04v24 |
| | | (67) | | | | (503) |
| | 2 | — | hFc-Hole | (G5S)3 | Con1 VL | — |
| cx3090 | 1 | 58E05v27 | hFc-Knob | IEPDI | Con1 VH | 57B04v24 |
| | | (67) | | | | (503, e.g. 43) |
| | 2 | — | hFc-Hole | IEPDI | Con1 VL | RH3v5-1 (41BB) |
| | | | | | | (400) |
| cx3243 | 1 | 58E05v27 | hFc-Knob | (G5S)3 | Con1 VH | 57B04v24 |
| | | (67) | | | | (503, e.g. 43) |
| | 2 | — | hFc-Hole | (G5S)3 | Con1 VL | RH3v5-1 (41BB) |
| | | | | | | (400) |
| cx3834 | 1 | 58E05v27 | hFc-Knob | IEPDI | Con1 VH | 58E05v27 |
| | | (67) | | | | (67) |
| | 2 | — | hFc-Hole | IEPDI | Con1 VL | — |
| cx3855 | 1 | 58E05v27 | xELL-Knob | IEPDI | Con1 VH | 58E05v27 |
| | | (67) | | | | (67) |
| | 2 | — | xELL-Hole | IEPDI | Con1 VL | RH3v5-1 (41BB) |
| | | | | | | (400) |
| cx3960 | 1 | 58E05v27 | hFc-Knob | IEPDI | Con1 VH | 1A5 |
| | | (67) | | | | (1) |
| | 2 | — | hFc-Hole | IEPDI | Con1 VL | — |
| cx4136 | 1 | 58E05v27 | xELL-Knob | (G5S)3 | Con1 VH | 58E05v27 |
| | | (67) | | | | (67) |
| | 2 | — | xELL-Hole | (G5S)3 | Con1 VL | — |
| cx4137 | 1 | 58E05v27 | xELL-Knob | (G5S)3 | Con1 VH | 58E05v27 |
| | | (67) | | | | (67) |
| | 2 | — | xELL-Hole | (G5S)3 | Con1 VL | RH3v5-1 (41BB) |
| | | | | | | (400) |
| cx4641 | 1 | 58E05v27 | xELL-Knob | IEPDI | Con1 VH | 1A5 |
| | | (67) | | | | (1) |
| | 2 | — | xELL-Hole | IEPDI | Con1 VL | — |
| cx4645 | 1 | 58E05v27 | xELL-Knob | IEPDI | Con1 VH | 1A5 |
| | | (67) | | | | (1) |
| | 2 | — | xELL-Hole | IEPDI | Con1 VL | — |
| cx4736 | 1 | 58E05v27 | xELL-Knob | IEPDI | Con1 VH | 58E05v27 |
| | | (67) | | | | (67) |
| | 2 | — | xELL-Hole | IEPDI | Con2 VL | — |
| cx4904 | 1 | 58E05v27 | xELL-Knob | IEPDI | Con1 VH | 58E05v27 |
| | | (67) | | | | (67) |
| | 2 | — | xELL-Hole | IEPDI | Con1 VL | RH3v5-1 (41BB) |
| | | | | | | (400) |
| cx4908 | 1 | 58E05v27 | xELL-Knob | IEPDI | Con1 VH | 1A5v12 |
| | | (67) | | | | (8) |
| | 2 | — | xELL-Hole | IEPDI | Con1 VL | RH3v5-1 (41BB) |
| | | | | | | (400) |

### Example 5: Comparison of Binding to Isolated Primary T-cells vs. B7H3-Expressing Cancer Cells

[0858] Binding of exemplary B7H3-targeting constrained CD3 engaging constructs set forth in Table E3 to CD3 on the surface of primary T cells or B7H3-expressing cells (A375) was assessed by flow cytometry. The T cells were primary T-cells that were negatively enriched from PBMCs isolated from healthy human donor peripheral blood leukopaks. Bound construct was detected with fluorophore-conjugated secondary antibodies specific for the human Fc (anti-human IgG APC secondary antibody) and binding was measured by flow cytometry. Cells incubated with secondary antibody only served as negative controls. Binding was compared to Dual-affinity Re-targeting Antibody (DART)-monomeric Fc format targeting B7H3 and CD3 (DART-Fc B7H3xCD3; see e.g. WO2017030926A1).

[0859] The results, from flow cytometry histograms displaying normalized cell counts versus fluorescence at 200 nM of each construct, are shown in FIGS. 4A-C (cx3855), FIGS. 5A-C (cx4137), FIGS. 6A-C (cx3090), FIGS. 7A-C (cx3243), FIGS. 8A-C (cx4736), FIGS. 9A-C (cx4136), FIGS. 10A-C (cx3072), FIGS. 11A-C (cx4641), FIGS. 12A-C (cx4645), FIGS. 13A-C (cx4736, 50 nM), FIGS. 14A-C (cx4736, 12.5 nM), FIGS. 15A-C (cx2846), FIGS. 16A-C (cx3834), FIGS. 17A-C (cx3960), FIGS. 18A-C (cx4904) and FIGS. 19A-C (cx4908). As shown, the representative B7H3-targeting constrained CD3 engagers were found to bind A375 cells expressing B7H3 (part “A” of each of the figures). However, as shown in parts “B” and “C” of each of the figures, the same constructs were not able to bind to T cells in isolation. In these studies, the binding of the representative B7H3-targeting constrained CD3 engager cx3855 was compared to an analog of a Dual-affinity Re-targeting Antibody (DART)-monomeric Fc format targeting B7H3 and CD3 (DART-Fc B7H3xCD3; see e.g. WO2017030926A1). The DART-Fc B7H3xCD3 contained a B7H3 sequence as set forth in SEQ ID NO: 418, 419, 420. Notably only the DART-Fc format was observed to allow for T-cell binding in the absence of B7H3 engagement (FIG. 4B), whereas, both constructs displayed binding to B7H3-expressing cells (FIG. 4A).

[0860] Table E4 summarizes the affinity of exemplary molecules for B7H3 or CD3, as determined from flow cytometry, in these studies.

TABLE E4
Construct Binding Affinity

| | Affinity | Affinity |
|---|---|---|
| Construct # | B7H3 | CD3 |
| cx3072 | 0.539 nM | >200 nM |
| cx3090 | 0.523 nM | >200 nM |
| cx3243 | 0.477 nM | >200 nM |
| cx3855 | 0.395 nM | >200 nM |
| cx4136 | 0.368 nM | >200 nM |
| cx4137 | 0.375 nM | >200 nM |
| cx4641 | 0.379 nM | >200 nM |
| cx4645 | 1.776 nM | >200 nM |
| cx4736 | 0.468 nM | >200 nM |

### Example 6: Assessment of B7H3-Dependent CD3 Reporter T Cell Activation using a Reporter Assay

[0861] This example describes assessment of the ability of various representative B7H3-targeting constrained CD3 engaging constructs to activate a CD3 NFAT reporter Jurkat cell line in co-culture with B7H3-expressing cells. In the reporter assay, engagement of CD3 in the Jurkat cells results in NFAT signaling and production of green fluorescence. These assays were used to demonstrate that while T-cell binding via the CD3-binding domain is restricted or inhibited on isolated T-cells (as shown in Example 5), once the B7H3-targeted constrained CD3 engaging constructs provided herein are bound to a cognate antigen they are capable of engaging T-cells and mediating T-cell activation.

[0862] Antigen targeting constrained CD3 engaging constructs were titrated onto co-cultures of B7H3-expressing target cells, A375, and engineered Jurkat cells that expressed NFAT-driven green fluorescence protein (GFP). For reporter assays utilizing adherent target cells, 2.5×10⁴ target cells were seeded, allowed to settle at room temperature for uniform distribution, and incubated for several hours at 37° C. to permit adherence prior to addition of 5.0×10⁴ reporter cells per well and antigen targeting constrained CD3 engaging constructs. Assay plates were serially imaged using an IncuCyte ZOOM system and CD3 reporter cell activation was determined by measuring total green object integrated intensity. As shown in FIG. 20A and 20B, assessed B7H3-targeted constrained CD3 engaging constructs induced reporter activity in cultures containing B7H3 positive cells (A375) (FIG. 20A), but no measurable reporter activity was observed when T cells were cultured with B7H3 negative cells (A375 B7H3−/−) (FIG. 20B).

### Example 7: Assessment of Functional Activity

[0863] This example describes the assessment and characterization of exemplary generated B7H3-target constrained CD3 engaging constructs in human primary T cell in vitro assays. Functional activity was compared to the B7H3xCD3 DART-Fc described above.

### 1. T Cell-Mediated Cytotoxicity

[0864] Target cells were fluorescently labeled with CytolD red. For cytotoxicity assays utilizing adherent target cells (e.g. A375, A355del B7H3 (B7H3−/−), A549), 1.0×10⁴ target cells were seeded per well, allowed to settle at room temperature for uniform distribution, and incubated for several hours at 37° C. to permit adherence prior to addition of other assay components. Primary T cells were negatively enriched from PBMCs isolated from healthy human donor leukopaks and added at a 10:1 T cell-to-target cell ratio. Green caspase-3/7 reagent was added, which fluorescently labels nuclear DNA of cells undergoing apoptosis was added (Essen BioScience). Antibodies were titrated onto the co-culture and assay plates were serially imaged using an IncuCyte ZOOM system. Target cell death was determined by measuring total red/green overlap object area.

[0865] As shown in FIG. 21A, assessed B7H3-targeted constrained CD3 engaging constructs induced potent T-cell-mediated cytotoxicity of B7H3 positive cells (A375). As shown in FIG. 21B, no measurable T cell cytotoxicity was observed against B7H3 negative cells (A375 B7H3−/−), consistent with the capacity to potently induce antigen-dependent T-cell activation. These constructs displayed similar potencies to an alternative format, DART-Fc B7H3xCD3. These observations support that the antigen-targeted constrained CD3 format provided herein compared to other CD3 engaging formats, lack or exhibit reduced T-cell binding in isolation while maintaining potent B7H3-dependent T-cell cytotoxicity inducing capacities.

### 2. T Cell Activation

[0866] To assess T cell activation, suspension cells from T cell-mediated cytotoxicity assays were collected and stained with a live/dead stain and fluorophore-conjugated anti-CD4, anti-CD8, anti-CD25, anti-CD69, and/or anti-CD71 antibodies. Cells were analyzed using a SONY SA3800 spectral analyzer and CD4+ or CD8+ T cell activation was determined by measuring expression levels of CD25, CD69 or CD71 or percent CD25-, CD69- or CD71-positive.

[0867] FIGS. 22A-22B and FIGS. 25A-25B depict results for CD25 expression on CD4 T cells and CD8 T cells, respectively, upon culture of T cells with B7H3 positive cells (A375) or B7H3 negative cells (A375 B7H3−/−) in the presence of exemplary constructs. FIGS. 23A-23B and FIGS. 26A-26B depict results for CD69 expression on CD4 cells and CD8 T cells, respectively, upon culture of T cells with B7H3 positive cells (A375) or B7H3 negative cells (A375 B7H3−/−) in the presence of exemplary constructs. FIGS. 24A-24B and FIGS. 27A-27B depict results for CD71 expression on CD4 T cells and CD8 T cells, respectively, upon culture of T cells with B7H3 positive cells (A375) or B7H3 negative cells (A375 B7H3−/−) in the presence of exemplary constructs. The results showed that exemplary assessed B7H3-targeting constrained CD3 engaging constructs mediated a dose-dependent B7H3-dependent T-cell activation via CD3 binding, as evidenced by increased expression of CD25, CD69 and CD71 in CD4+ and CD8+ T cells Similar potencies of T-cell activation by the constrained CD3 engaging constructs and the DART-Fc format were observed despite the significant differences in T-cell binding by these two formats.

[0868] Thus, the results demonstrated that the B7H3-targeting constrained CD3 engaging constructs of the present invention induced potent antigen-dependent activation of both CD4 and CD8 T-cells.

### 3. T Cell Cytokine Production (ELISA)

[0869] Supernatants from T cell-mediated cytotoxicity assays were analyzed for IFNγ content by sandwich ELISA (BioLegend, USA). The manufacturer's instructions were followed, and a standard curve was generated from which cytokine concentration values of supernatant samples were interpolated. Samples that had absorbance values below the lower limit of detection were assigned a cytokine concentration equal to half that of the lowest standard concentration. FIG. 28A shows that representative B7H3-targeted constrained CD3 engaging constructs cx4136, cx4137, cx3960, and cx2846 were observed to elicit IFNγ production by T-cells in an antigen-dependent manner.

### 4. T Cell Cytokine Production (FluoroSpot)

[0870] FluoroSpot membranes were coated with IFNγ and TNFα capture antibodies overnight at 4° C. Membranes were washed with PBS and antibody titrations, target cells, and PBMCs or purified T cells negatively enriched from PBMCs were added. Cells were seeded at a 1:10 ratio of target cell to effector cell. Assay plates were incubated for ˜24 h at 37° C. and membranes were prepared according to the manufacturer's (C.T.L.) instructions. Membranes were imaged using a CTL-ImmunoSpot S6 Universal Analyzer. Cytokine spot count was measured using uniform exposure time and intensity settings among assay wells. FIG. 28B and 28C (IFNγ) and FIG. 28D (TNFα) depict the ability of exemplary B7H3-targeted constrained CD3 engaging constructs to elicit cytokine production from PBMCs or T cells in B7H3-dependent manner.

### Example 8: ADCC Reporter Activation

[0871] To assess the Fc effector function of exemplary B7H3 targeting sdAbs, a Jurkat reporter cell line engineered to stably express CD16a with an NFAT-driven luciferase reporter gene was used. Jurkat reporter cells were seeded (approximately 9×10⁴ cells/well) in the absence or presence of high B7H3 expressing A375 cells (3×10⁴ cells/well). 58E05-Fc, hz58E05v55-Fc, hz1A5v53-Fc or anti-B7H3 IgG1 antibody (derived from sequence published in U.S. Pat. No. 9,896,508) were titrated onto cells and assay plates were incubated at 37 degrees Celsius for 5.5 hours, with a final assay volume of 125 microliters. Assay plates were equilibrated to room temperature, 100 microliters Bio-Glo was added to sample wells, and assay plates were incubated at room temperature for an additional 10 minutes. 100 microliter aliquots were transferred to white 96-well plates and luminescence was measured using a SpectraMax L. FIG. 29A depicts the ability of 58E05-Fc to activate CD16a reporter cells in an antigen-dependent manner. FIG. 29B depicts the ability of hz58E05v55-Fc and hz1A5v53Fc to activate the Jurkat reporter cells, whereas the comparator B7H3-mAb IgG1 antibody did not display this ability.

### Example 9: Generation of Additional Constructs with Constrained CD3 Binding

[0872] Example 9 describes the generation and expression of multispecific polypeptide constructs containing a CD3 binding region that exhibits constrained CD3 binding. The multispecific constructs were generated in various configurationsto contain a heterodimeric Fc region of an immunoglobulin coupled by a linker (e.g. a non-cleavable linker) to the CD3 binding region, and one or more antigen binding domains that binds a tumor associated antigen (TAA) positioned amino-terminally relative to the Fc region and/or carboxy-terminally relative to the CD3 binding region of the multispecific polypeptide construct.

### A. Design and Generation of Constructs

[0873] Polynucleotides encoding at least a first polypeptide chain and a second polypeptide chain of the heterodimeric multispecific polypeptide construct were generated and cloned into a plasmid for expression. The first polypeptide chain generally included in order, from the N-terminus to C-terminus, a first Fc polypeptide (e.g. an Fc hole polypeptide); a non-cleavable linker; and a variable light (VL) domain of an anti-CD3 antibody. The second polypeptide chain generally included in order, from the N-terminus to C-terminus, a second Fc polypeptide (e.g. an Fc knob polypeptide); the same non-cleavable linker as the first polypeptide chain; and a variable heavy (VH) domain of an anti-CD3 antibody. The anti-CD3 antibody included either a disulfide-stabilized (dsFv) antibody (anti-CD3 VH with the mutation G44C and VL with the mutation G100C) or contained a non-disulfide stabilized Fv antibody, as set forth in Table ES. Various exemplary Fc polypeptide pairs to facilitate heterodimerization of the polypeptide chains were used as set forth in Table ES. One or both of the polypeptide chains additionally encoded one or more TAA antigen binding domain amino-terminal to the Fc domain and/or carboxy-terminal to the CD3 binding region, in various configurations. Similar constructs can be generated using other heterodimeric Fc configurations, including other knob-into-hole configurations, such as any as described; other CD3-binding regions, including other anti-CD3 antibodies, including dsFv or other monovalent fragments; or other TAA antigen-binding fragments, such as scFv, sdAb or Fab formats can also be used.

[0874] Among generated constructs, the non-cleavable linker included linkers ranging from 3-18 amino acids in size. Examples of non-cleavable linkers used in exemplary generated molecules were GGS, GGSGGS (SEQ ID NO:191), GGSGGSGGS (SEQ ID NO:192), GGSGGSGGSGGS (SEQ ID NO:193), GGSGGSGGSGGSGGS (SEQ ID NO:194), and GGGGGSGGGGGSGGGGGS (SEQ ID NO:317, contained in exemplary construct cx5823 and cx5952) or GGSGGGGSGGGGSGGGGS (SEQ ID NO:319).

[0875] Any antigen binding domain that binds to a TAA can be employed in the provided multispecific polypeptide constructs. Exemplary generated proteins contained an antigen binding domain that binds B7H3 (CD276). The antigen-binding domain can include single chain fragments (e.g. sdAb or scFv) or two chain antigen-binding fragments (Fabs). When the TAA was provided as a single chain fragment, e.g. sdAb or scFv, the TAA antigen binding domain was linked at the N-terminus to one or both polypeptide chains of the Fc heterodimer (e.g. hole and/or knob) by a peptide linker, e.g. PGGGG (SEQ ID NO:444) and/or was linked at the C-terminus to one or both domains (e.g. VH and/or VL) of the CD3 binding region by a peptide linker, e.g. GGGG (SEQ ID NO:195). Other similar peptide linkers can be employed. When the TAA was provided as a Fab antigen-binding fragment the construct was composed of a VH and CH1 linked directly to one or both Fc polypeptides without a linker, as well as a light chain composed of a VL and CL. These TAA binding Fabs can be located on the amino- or carboxy-terminus of the heterodimeric Fc.

[0876] Multispecific polypeptide constructs were generated containing 1, 2, 3 or 4 TAA antigen binding domain, such as to provide for monovalent, bivalent, trivalent, or tetravalent binding, respectively. In some cases, the TAA antigen binding domains were the same (mono-epitopic). In some cases, the TAA antigen binding domains were different, such that the generated multispecific polypeptide constructs exhibited specificity for at least two different TAAs, to different epitopes of the same TAA (bi-epitopic) or the same epitopes of the same TAA (mono-epitopic).

[0877] Among the generated proteins were constructs in which the TAA antigen binding domains were composed as single domain antibodies (sdAbs) of antigen-binding fragments (Fabs). Polynucleotides were generated to encode polypeptide chains of exemplary multispecific polypeptide constructs containing non-cleavable linkers. These included sdAb-containing constructs designated cx3072, cx5952, cx6079, cx6080, cx6081, cx5823, cx5873, and cx5965, targeting B7H3 as depicted in FIGS. 30A and 30B; and Fab-containing constructs designated cx5067, 6083, and 6084, targeting B7H3 as depicted in FIG. 30C. Some constructs were generated wherein the VH domain of the dsFv anti-CD3 antibody and the sdAb were both linked to the same side (e.g. hole or knob side) of the Fc heterodimer (e.g. cx3072 and cx5952, shown in FIG. 30A). Constructs were engineered without a disulfide stabilized Fv or were engineered with a disulfide linkage stabilizing the VH and VL domains of the anti-CD3 antibody. Notably, some of the exemplary constructs generated additionally contained a sdAb (containing a CDR1, a CDR2 and a CDR3 set forth in SEQ ID Nos: 468, 469 and 470, respectively; e.g. SEQ ID NO:400) targeting a 4-1BB co-stimulatory receptor (e.g. cx5823, cx5873, cx5965). A list of exemplary constrained CD3 binding constructs having sdAb and Fab TAA domains is given below in Table E5.

TABLE E5
Exemplary Constrained CD3 engaging constructs

| | | N-term | | | CD3 | C-term | |
|---|---|---|---|---|---|---|---|
| Construct | | sdAb | | | Binding | sdAb | Disulfide |
| ID | Chain | (Target) | Fc | Linker | Domain | (Target) | Stabilized |
| cx5823 | 1 | B7H3 | xELL- | GGGGGSGGGG | VH13 (SEQ | B7H3 sdAb | yes |
| | | sdAb 4 | Knob | GSGGGGGS | ID NO: 237) | 5 | |
| | | hz1A5v5 | (SEQ ID | (SEQ ID NO: 317) | | hz58E05v55 | |
| | | 1 (SEQ | NO: 299) | | | (SEQ ID | |
| | | ID | | | | NO: 466) | |
| | | NO: 467) | | | | | |
| | 2 | None | xELL- | GGGGGSGGGG | VL10 (SEQ | Co-stim | |
| | | | Hole | GSGGGGGS | ID NO: 265) | Recept or | |
| | | | (SEQ ID | (SEQ ID NO: 317) | | sdAb | |
| | | | NO: 304) | | | | |
| cx5952 | 1 | B7H3 | xELL- | GGGGGSGGGG | VH13 (SEQ | B7H3 sdAb | yes |
| | | sdAb 4 | Knob | GSGGGGGS | ID NO: 237) | 5 | |
| | | hz1A5v5 | (SEQ ID | (SEQ ID NO: 317) | | hz58E05v55 | |
| | | 1 (SEQ | NO: 299) | | | (SEQ ID | |
| | | ID | | | | NO: 466) | |
| | | NO: 467) | | | | | |
| | 2 | None | xELL- | GGGGGSGGGG | VL10 (SEQ | None | |
| | | | Hole | GSGGGGGS | ID NO: 265) | | |
| | | | (SEQ ID | (SEQ ID NO: 317) | | | |
| | | | NO: 304) | | | | |
| cx6079 | 1 | B7H3 | Fc-Het-1 | GGGGSGGGGS | VH32 (SEQ | None | no |
| | | sdAb 4 | (SEQ ID | GGGGS (SEQ ID | ID NO: 460) | | |
| | | hz1A5v5 | NO: 457) | NO: 318) | | | |
| | | 1 (SEQ | | | | | |
| | | ID | | | | | |
| | | NO: 467) | | | | | |
| | 2 | B7H3 | Fc-Het-2 | GGGGSGGGGS | VL20 (SEQ | None | |
| | | sdAb 4 | (SEQ ID | GGGGS (SEQ ID | ID NO: 461) | | |
| | | hz1A5v5 | NO: 458) | NO: 318) | | | |
| | | 1 (SEQ | | | | | |
| | | ID | | | | | |
| | | NO: 467) | | | | | |
| cx6080 | 1 | B7H3 | Fc-Het-1 | GGGGSGGGGS | VH33 (SEQ | None | yes |
| | | sdAb 4 | (SEQ ID | GGGGS (SEQ ID | ID NO: 480) | | |
| | | hz1A5v5 | NO: 457) | NO: 318) | | | |
| | | 1 (SEQ | | | | | |
| | | ID | | | | | |
| | | NO: 467) | | | | | |
| | 2 | B7H3 | Fc-Het-2 | GGGGSGGGGS | VL21 (SEQ | None | |
| | | sdAb 4 | (SEQ ID | GGGGS (SEQ ID | ID NO: 459) | | |
| | | hz1A5v5 | NO: 458) | NO: 318) | | | |
| | | 1 (SEQ | | | | | |
| | | ID | | | | | |
| | | NO: 467) | | | | | |
| cx6081 | 1 | B7H3 | Fc-Het-1 | GGGGSGGGGS | VH13 (SEQ | None | yes |
| | | sdAb 4 | (SEQ ID | GGGGS (SEQ ID | ID NO: 237) | | |
| | | hz1A5v5 | NO: 457) | NO: 318) | | | |
| | | 1 (SEQ | | | | | |
| | | ID | | | | | |
| | | NO: 467) | | | | | |
| | 2 | B7H3 | Fc-Het-2 | GGGGSGGGGS | VL10 (SEQ | None | |
| | | sdAb 4 | (SEQ ID | GGGGS (SEQ ID | ID NO: 265) | | |
| | | hz1A5v5 | NO: 458) | NO: 318) | | | |
| | | 1 (SEQ | | | | | |
| | | ID | | | | | |
| | | NO: 467) | | | | | |
| cx3072 | 1 | B7H3 | IgG1- | GGGGGSGGGG | VH13 (SEQ | B7H3 sdAb | yes |
| | | sdAb 2 | Knob | GSGGGGGS | ID NO: 237) | 1 | |
| | | hz58E05 | (SEQ ID | (SEQ ID NO: 317) | | hz57B04v24 | |
| | | v27 | NO: 293, | | | (SEQ ID | |
| | | (SEQ ID | 297 or | | | NO: 503, | |
| | | NO: 67) | 445) | | | e.g. 43) | |
| | 2 | None | IgG1- | GGGGGSGGGG | VL10 (SEQ | None | |
| | | | Hole | GSGGGGGS | ID NO: 265) | | |
| | | | (SEQ ID | (SEQ ID NO: 317) | | | |
| | | | NO: 294, | | | | |
| | | | 298 or | | | | |
| | | | 446) | | | | |
| cx5873 | 1 | None | xELL- | GGGGGSGGGG | VH13 (SEQ | B7H3 sdAb | yes |
| | | | Knob | GSGGGGGS | ID NO: 237) | 3 | |
| | | | (SEQ ID | (SEQ ID NO: 317) | | hz58E05v48 | |
| | | | NO: 295, | | | (SEQ ID | |
| | | | 299) | | | NO: 85) | |
| | 2 | None | xELL- | GGGGGSGGGG | VL10 (SEQ | Co-stim | |
| | | | Hole | GSGGGGGS | ID NO: 265) | Recept or | |
| | | | (SEQ ID | (SEQ ID NO: 317) | | sdAb | |
| | | | NO: 302, | | | | |
| | | | 304) | | | | |
| cx5965 | 1 | B7H3 | xELL- | GGGGGSGGGG | VH13 (SEQ | none | yes |
| | | sdAb 4 | Knob | GSGGGGGS | ID NO: 237) | | |
| | | hz1A5v5 | (SEQ ID | (SEQ ID NO: 317) | | | |
| | | 1 (SEQ | NO: 295, | | | | |
| | | ID | 299) | | | | |
| | | NO: 467) | | | | | |
| | 2 | None | xELL- | GGGGGSGGGG | VL10 (SEQ | Co-stim | |
| | | | Hole | GSGGGGGS | ID NO: 265) | Recept or | |
| | | | (SEQ ID | (SEQ ID NO: 317) | | sdAb | |
| | | | NO: 302, | | | | |
| | | | 304) | | | | |
| cx5187 | 1 | B7H3 | xELL- | GGGGGSGGGG | VH13 (SEQ | B7H3 sdAb | yes |
| | | sdAb 4 | Knob | GSGGGGGS | ID NO: 237) | 3 | |
| | | hz1A5v5 | (SEQ ID | (SEQ ID NO: 317) | | hz58E05v48 | |
| | | 1 (SEQ | NO: 295, | | | (SEQ ID | |
| | | ID | 299) | | | NO: 85) | |
| | | NO: 467) | | | | | |
| | 2 | None | xELL- | GGGGGSGGGG | VL10 (SEQ | Co-stim | |
| | | | Hole | GSGGGGGS | ID NO: 265) | Recept or | |
| | | | (SEQ ID | (SEQ ID NO: 317) | | sdAb | |
| | | | NO: 302, | | | | |
| | | | 304) | | | | |
| cx5067 | 1 | B7H3- | Fc-Het-1 | GGGGSGGGGS | VH32 (SEQ | None | no |
| | | Fab | (SEQ ID | GGGGS (SEQ ID | ID NO: 460) | | |
| | | (SEQ ID | NO: 457) | NO: 318) | | | |
| | | NOs: | | | | | |
| | | 455, 456) | | | | | |
| | 2 | B7H3- | Fc-Het-2 | GGGGSGGGGS | VL20 (SEQ | None | |
| | | Fab | (SEQ ID | GGGGS (SEQ ID | ID NO: 461) | | |
| | | (SEQ ID | NO: 458) | NO: 318) | | | |
| | | NOs: | | | | | |
| | | 455, 456) | | | | | |
| cx6083 | 1 | B7H3- | Fc-Het-1 | GGGGSGGGGS | VH33 (SEQ | None | yes |
| | | Fab | (SEQ ID | GGGGS (SEQ ID | ID NO: 480) | | |
| | | (SEQ ID | NO: 457) | NO: 318) | | | |
| | | NOs: | | | | | |
| | | 455, 456) | | | | | |
| | 2 | B7H3- | Fc-Het-2 | GGGGSGGGGS | VL21 (SEQ | None | |
| | | Fab | (SEQ ID | GGGGS (SEQ ID | ID NO: 459) | | |
| | | (SEQ ID | NO: 458) | NO: 318) | | | |
| | | NOs: | | | | | |
| | | 455, 456) | | | | | |
| cx6084 | 1 | B7H3- | Fc-Het-1 | GGGGSGGGGS | VH13 (SEQ | None | yes |
| | | Fab | (SEQ ID | GGGGS (SEQ ID | ID NO: 237) | | |
| | | (SEQ ID | NO: 457) | NO: 318) | | | |
| | | NOs: | | | | | |
| | | 455, 456) | | | | | |
| | 2 | B7H3- | Fc-Het-2 | GGGGSGGGGS | VL10 (SEQ | None | |
| | | Fab | (SEQ ID | GGGGS (SEQ ID | ID NO: 265) | | |
| | | (SEQ ID | NO: 458) | NO: 318) | | | |
| | | NOs: | | | | | |
| | | 455, 456) | | | | | |

### B. Expression and Purification of Generated Constructs

[0878] Separate plasmids encoding each chain of the heterodimeric constrained CD3 binding protein were transiently transfected at an equimolar ratio into mammalian cells (either HEK293 or CHO) using polyethylenimine Recombinant protein secreted into the supernatant was collected after 3-14 days, and purified by protein A chromatography, followed by either preparative size exclusion chromatography (SEC) or flow-through hydrophobic interaction chromatography (HIC). In some cases, heterodimeric protein was enriched for during purification due to a mutation designed into one chain of the heterodimeric Fc at position I253R or H435R (e.g. in the hole-Fc) such that it did not bind protein A, and thus homodimers of I253R or H435R were not purified. The second chromatography step by SEC (AKTA with Superdex-200 resin) or FT-HIC (AKTA with butyl/phenyl sepharose) was used to remove undesired cross-paired species containing two heterodimeric Fcs that were more hydrophobic and twice the expected molecular weight.

[0879] The method favored production of heterodimeric multispecific polypeptide constructs, containing properly paired species of heterodimeric Fc and the anti-CD3 Fv (e.g. disulfide stabilized anti-CD3 Fv). Purified heterodimeric constrained CD3 binding protein was stable and did not accumulate cross-paired species upon prolonged incubation at 4° C. or increased protein concentration.

### Example 10: Assessment of Binding of Constrained CD3 Binding Constructs to Cancer Cells ad Primary T cells by Flow Cytometry

[0880] This Example describes studies assessing binding of exemplary constructs to T cells or to cancer cells. These studies were carried out in single cultures containing either only the T cells or only the cancer cells in isolation from each other.

[0881] Binding of exemplary multispecific constructs containing an antigen-binding domain directed against B7H3 were assessed for binding to B7H3 positive A375 tumor cells or primary T-cells. The constructs were generated containing antigen-binding domain(s) that were either sdAbs or a FABs, and that were positioned either only N-terminal to the Fc or both N-terminal to the Fc and C-terminal to the anti-CD3 binding domain (see FIGS. 30A and 30C and Table E5). Among the various formats of constructs tested included: sdAb-Fc-dsFV-sdAb (cx3072, cx5952) sdAb-Fc-FV (cx6079), sdAb-Fc-dsFV (cs6080, cx6081), MAB-FV (cx5067) and MAB-dsFV (cx6083, cx6084), where the FV represents the anti-CD3 binding domain composed of VH and VL domain pairs and “ds” notes disulfide stabilized via an engineered interdomain disulfide bond.

[0882] FIGS. 31A-F demonstrate that these constructs were capable of binding to B7H3 but not T-cells in isolation. Binding was assessed as described above via flow cytometry using a fluorophore-conjugated anti-human Fc secondary antibody. cx3072 bound to A375 cells with high affinity (FIG. 31A) but not to isolated T-cells (FIG. 31B). The tested sdAb-Fc-dsFV-sdAb (cx5952) displayed higher binding affinity compared to a FAB containing MAB-FV (cx5067) and MAB-dsFV constructs (cx6083, cx6084) (FIG. 31C). The B7H3 -targeting sdAb containing constructs (cx5952, cx6079, cx6080, and cx6081) bound to B7H3 positive cells with similar affinities (depicted in FIG. 31E), with cx5952 displaying higher maximal binding. cx6079, cx6080 and cx6081 contain two identical B7H3-targeting sdAbs, whereas cx5952, and cx3072 contain two distinct B7H3-targeting sdAb that bind different epitopes. The MAB-FV, cx5067, contains two identical B7H3-targeting FAB domains. Notably none of the exemplary B7H3-targeted constrained CD3 engaging constructs bound primary human T-cells, as depicted in FIGS. 31B, 31D, and 31F. These results further support that binding to CD3 on T cells in isolation is constrained in the provided formats.

### Example 11: Assessment of T Cell Activating Activity of B7H3-Targeted Constrained CD3 Binding Constructs

[0883] Constructs containing either a B7H3-targeted sdAb or a Fab as the tumor-associated antigen-binding domain were assessed for T-cell activating activity in a T cell reporter assay and in a T cell cytotoxicity assay. Activity of B7H3-targeted constrained CD3 engaging constructs that were formatted with an anti-B7H3 sdAb (e.g. cx5823, cx6079, cx6080, cx6081, cx3072 and cx5952) or anti-B7H3 MAB constructs formatted with a Fab (e.g. cx5067, cx6083 or cx6084) as the antigen-binding domain(s) were assessed (see FIGS. 30A-30C and Table E5). All tested constructs, except cx5067 and cx6079, contained a disulfide-stabilized anti-CD3 Fv (dsFv) containing an interchain disulfide bond created by the modification of anti-CD3 VH G44C paired with VL G100C. The anti-CD3 Fv of cx5067, designated MAB-Fv, and the anti-CD3 Fv of cx6079, designated sdAb-Fc-Fv, were not disulfide-stabilized.

### A. T Cell Reporter Activity

[0884] The NFAT-GFP CD3 Jurkat reporter was used to compare the CD3 agonistic properties of B7H3-targeted constrained CD3 engaging constructs when co-cultured in the presence of B7H3-positive cells (A375) or non-target CCRF-CEM cells that naturally lack B7H3 expression. The Jurkat cells express NFAT-driven green fluorescence protein (GFP). Agonism of CD3 results in NFAT signaling and production of green fluorescence.

[0885] Antigen targeting constrained CD3 engaging constructs were titrated onto co-cultures of target cells and engineered Jurkat cells that express NFAT-driven green fluorescence protein (GFP). In this assay, target cell lines included either A375 or CCRF-CEM. For reporter assays utilizing adherent antigen expressing target cells, target cells were seeded, allowed to settle at room temperature for uniform distribution, and incubated for several hours at 37° C. to permit adherence prior to addition of reporter cells and antigen targeting constrained CD3 engaging constructs. Assay plates were serially imaged using an IncuCyte ZOOM system and CD3 reporter cell activation was determined by measuring total green object integrated.

[0886] In this assay, anti-B7H3 sdAb constructs, cx5823, cx6079, cx6080 and cx6081, or anti-B7H3 Fabs constructs, cx5067, cx6083 and cx6084, were used as the B7H3-targeting domains. As shown in FIG. 32A, the constructs containing B7H3-targeted sdAb displayed similar potencies of antigen-dependent CD3 activation. As shown in FIG. 32C the exemplary cx5823 construct containing B7H3-targeted sdAbs was found to be superior at mediating antigen-dependent CD3 activation compared to the constructs containing B7H3-targeted Fabs. Although cx5823 is formatted with a binding domain for a costimulatory receptor, it is unlikely that this component contributed to the difference in results, since Jurkat T cells do not express the costimulatory receptor. None of the constructs demonstrated activity against the B7H3-negative CCRF-CEM cells (FIGS. 32B and 32D).

### B. Cytotoxicity

[0887] To further assess activity of the molecules, exemplary B7H3-targeted constructs cx3072 and cx5952 (each formatted as sdAb-dsFv), cx6083 and cx6084 (MAB-dsFv), cx5067 (MAB-Fv), cx6079 (sdAb-Fv), and cx6080 and cx 6081 (sdAb-dsFv) were tested in a T-cell-mediated cytotoxicity assay. Target cells included the B7H3 positive cell line, A375, and either modified A375 cells, wherein B7H3 gene was disrupted by CRISPR (A375:B7H3 KD), or CCRF-CEM cells that naturally lacked B7H3 expression. Target cells were seeded at 1.0×10⁴ cells per well, allowed to settle at room temperature for uniform distribution, and incubated for several hours at 37° C. Primary T cells were negatively enriched from PBMCs isolated from healthy human donor leukopaks and added at a 10:1 T cell-to-target cell ratio. Green caspase-3/7 reagent was added, which fluorescently labels nuclear DNA of cells undergoing apoptosis was added. Multispecific constructs with constrained CD3 engaging activity were titrated onto the co-culture and assay plates were serially imaged using an IncuCyte ZOOM system. Target cell death was determined by measuring total red/green overlap object area.

[0888] As shown in FIGS. 33A and 33B, exemplary constructs cx3072 and cx5952 containing sdAb B7H3-targeted antigen-binding domains induced potent T-cell-mediated cytotoxicity of B7H3 positive cells (A375) but not B7H3 negative cells.

[0889] When compared to exemplary B7H3-targeting constrained CD3 engagers with Fab B7H3-targeting domains (cx5067, cx6083 and cx6084), the exemplary cx5952 sdAb B7H3-targeting constrained CD3 engager mediated enhanced target-dependent T-cell cytotoxicity (FIG. 34A). No measurable T cell cytotoxicity was observed against the B7H3 negative cell line CCRF-CEM for any of the tested constructs, consistent with the capacity to potently induce antigen-dependent T-cell activation (FIG. 34B). Of the constructs tested, representative MAB-dsFV constructs cx6084 and cx6083 contained the engineered disulfide, whereas the representative MAB-FV construct cx5067 lacked this stabilizing modification. Notably cx6083 and cx5067 are identical with the exception of the presence (cx6083) or absence (cx5067) of the engineered disulfide within the anti-CD3 FV domain (depicted in FIG. 30C). The engineered disulfide was created by the modification of G44C within VH and G100C within VL. As shown in FIG. 34A, cx6083 displayed superior potency in mediating target-dependent T-cell cytotoxicity compared to cx5067, suggesting that the incorporation of the inter-domain disulfide is beneficial in T-cell mediated cytotoxicity, likely by enhancing proper association of the VH and VL domains that comprise the anti-CD3 FV.

[0890] When compared to other exemplary B7H3-targeting constrained CD3 engagers with sdAb B7H3-targeting domains (cx6079, cx6080 and cx6081), the exemplary cx5952 sdAb B7H3-targeting constrained CD3 engager mediated enhanced target-dependent T-cell cytotoxicity (FIG. 34C). No measurable T cell cytotoxicity was observed against the B7H3 negative cell line CCRF-CEM for any of the tested constructs, consistent with the capacity to potently induce antigen-dependent T-cell activation (FIG. 34D). Of the constructs tested, sdAb-dsFV constructs cx5952, cx6080 and cx6081 contained the engineered disulfide linkage, whereas the sdAb-FV construct cx6079 lacked this stabilizing modification. The engineered disulfide was created by the modification of G44C within VH and G100C within VL. Notably, cx5952 was engineered to have two distinct B7H3 targeting domains, one located at the amino terminal and one located at the carboxy terminal. cx6079, cx6080, and cx6081 were engineered to have two identical B7H3 targeting domains, both located at the amino terminal (see FIG. 30A).

### C. T Cell Modulation

[0891] To further assess T cell modulation, exemplary multispecific CD3 constrained binding constructs were assessed by monitoring the ability of the constructs to modulate T cell activation markers. To assess T cell activation, suspension cells from the T cell cytotoxicity assays described above, involving culture of T cells with B7H3 positive cells (A375) or B7H3 negative cells (CCRF-CEM) in the presence of an exemplary B7H3-targeted constrained CD3 engaging construct, cx5952, were collected. Cells were stained with a live/dead stain and fluorophore-conjugated anti-CD4, anti-CD8, anti-CD25, anti-CD69, and/or anti-CD71 antibodies. Cells were analyzed using a SONY SA3800 spectral analyzer and CD4+ or CD8+ T cell activation was determined by measuring expression levels of CD25, CD69 or CD71 or percent CD25-, CD69- or CD71-positive cells.

[0892] Results are shown for CD25 expression (FIG. 35A), CD69 expression (FIG. 35B) and CD71 expression (FIG. 35C) on CD4+ and CD8+ T cells following the co-culture with B7H3 positive cells (A375) or B7H3 negative cells (CCRF-CEM) in the presence of cx5952. The results showed that cx5952 mediated a dose-dependent B7H3-dependent T-cell activation via CD3 binding, as evidenced by increased expression of CD25, CD69 and CD71 in CD4+ and CD8+ T cells.

[0893] When compared to the other exemplary B7H3-targeting constrained CD3 engagers with sdAb B7H3-targeting domains (cx6079, cx6080 and cx6081), the exemplary cx5952 sdAb B7H3-targeting constrained CD3 engager mediated increased T cell activation as evidenced by increased expression of CD25 in CD4+ T cells (FIG. 35D) and in CD8+ T cells (FIG. 35H) and increased expression of CD71 in CD4+ T cells (FIG. 35F) and in CD8+ T cells (FIG. 35J). Increased expression of the surface markers on T cells was not observed in the presence of the B7H3-targeting constrained CD3 engager constructs in cultures with B7H3 negative cell lines (FIGS. 35E and 35G for CD4+ T cells and FIGS. 351 and 35K for CD8+ T cells).

### D. T Cell Cytokine Production

[0894] Supernatants from T cell cytotoxicity tumor cell co-culture assays, involving co-culture of T cells with B7H3 positive A375 cells or B7H3 negative CCRF-CEM cells in the presence of cx5952, cx6083, cx6084 or cx5067, were analyzed for IFNγ content by sandwich ELISA. A standard curve was generated from which cytokine concentration values of supernatant samples were interpolated. Samples that had absorbance values below the lower limit of detection were assigned a cytokine concentration equal to half that of the lowest standard concentration. As shown in FIG. 36A, the representative sdAb-Fc-dsFV-sdAb construct, cx5952, was superior to the tested B7H3-targeted FAB containing constructs, cx6083, cx6084 and cx5067 at eliciting target-dependent cytokine release from activated T-cells. Importantly, the MAB-dsFV constructs, cx6083 and cx6084 were superior to the MAB-FV construct, cx5067, demonstrating the importance of interdomain disulfide stabilizing modification for enhancing T-cell function.

[0895] When compared to the other exemplary B7H3-targeting constrained CD3 engagers with sdAb B7H3-targeting domains (cx6079, cx6080 and cx6081), the exemplary cx5952 sdAb B7H3-targeting constrained CD3 engager mediated substantially increased production of IFNγ in the presence of B7H3-target cells T cells but not in cultures with B7H3 negative cell lines (FIG. 36B).

### E. Summary

[0896] These observations further support that the antigen-targeted constrained CD3 format provided herein lack or exhibit reduced T-cell binding in isolation while maintaining potent B7H3-dependent T-cell cytotoxicity inducing capacities. Without wishing to be bound by theory, together these results show that utilization of antigen targeted sdAbs instead of a Fabs may reduce the immune synapse distance between the TAA expressing tumor cell and the CD3 expressing T-cells and enhance T cell activity and cytotoxicity. Notably, it was found that the inclusion of an interchain disulfide bond created by the modification of anti-CD3 VH G44C paired with VL G100C greatly enhanced the activity of constrained CD3 engaging constructs. Further, the more potent B7H3-dependent T cell activity by cx5952 compared to other sdAb B7H3-targeting domain constructs suggests that the positioning of the B7H3-targeting sdAb C-terminal to the anti-CD3 binding domain or the fact that cx5952 binds two distinct epitopes on B7H3 whereas the other constructs tested bind to a single epitope in a bivalent manner, contributed to this enhanced activity.

### Example 12: Assessment of CD3 Constrained Multispecific Constructs Containing Single or Multiple B7H3-Binding Targeting Domains

[0897] Activity of constructs containing a monovalent sdAb antigen-binding domain (positioned at either the N or C-terminus) was compared to activity of dual binding (bivalent) constructs that contained antigen-targeting sdAbs positioned at both the N and C-termini. Binding was assessed substantially as described in Example 10 and T cell activity was assessed in the Jurkat reporter assay and T cell cytotoxicity assays substantially as described in Example 11.

### A. Binding

[0898] As shown in FIG. 37A the bivalent B7H3-targeting constrained CD3 engaging constructs, cx5187 and cx5823, displayed higher affinity binding to B7H3 positive A375 cells, compared to the monovalent versions, cx5873 and cx5965. None of these constructs displayed any detectable binding to B7H3 negative CCRF-CEM cells or isolated T-cells (FIG. 37B).

### B. T Cell Reporter Activity

[0899] B7H3 Antigen-dependent CD3 agonistic capacities of antigen-targeted constrained CD3 engaging constructs that engage the antigen in a monovalent or bivalent manner were assessed using CD3-NFAT Jurkat reporter cells, in an assay substantially as described above. As shown in FIG. 37C, substantially increased fluorescence reporter activity was observed in the presence of the exemplary bivalent B7H3-targeted construct cx5187 compared to reporter activity for the exemplary monovalent constructs cx5873 and cx5965. No reporter activity was observed when constructs were incubated with Jurkat reporter cells co-cultured with B7H3-negiatve CCRF target cells (FIG. 37D).

### C. Cytotoxic Activity

[0900] Cytotoxicity of B7H3-targeted CD3 constrained binding constructs was assessed against a melanoma cell line, A375, and a T-cell acute lymphoblastic leukemia cell line, CCRF-CEM, which were used as B7H3 positive and negative cell lines, respectively. Cytotoxicity was assessed substantially as described in Example 11. As shown in FIG. 38A an exemplary bivalent B7H3-targeted constrained CD3 engaging construct, cx5187, displayed enhanced target-dependent T-cell mediated cytotoxicity compared to the monovalent versions of the constructs, cx5873 and cx5965. In these assays, no cytotoxicity was observed in the absence of B7H3 expression of the target cells, as shown in FIG. 38B wherein the CCRF-CEM cells were used as target cells. D. T Cell Modulation

[0901] T cell modulation was assessed by monitoring expression of CD25, substantially as described in Example 11, in suspension cells from T cell cytotoxicity assays above, involving culture of T cells with B7H3 positive cells (A375) or B7H3 negative cells (CCRF-CEM) in the presence of cx5187, cx5873 or cx5965. As shown in FIG. 39A and 39B, an exemplary bivalent B7H3-targeted constrained CD3 engaging construct, cx5187, displayed enhanced target-dependent T-cell mediated activation compared to the monovalent versions of the constructs, cx5873 and cx5965, as evidenced by enhanced potency of CD25 upregulation on CD4 and CD8 T-cells. In these assays, no T-cell activation was observed in the absence of B7H3 expression of the target cells, as shown in FIG. 39C and 39D, wherein the CCRF-CEM cells were used as target cells. These results demonstrated that the B7H3-targeting constrained CD3 engaging constructs induced potent antigen-dependent activation of both CD4 and CD8 T-cells.

### D. Summary

[0902] Together, these results demonstrate that bivalent antigen-targeted constrained CD3 engaging constructs displayed superior antigen-dependent CD3 binding and activity than the monovalent antigen-targeted constrained CD3 engaging constructs. These results are consistent with a finding that constructs containing dual antigen-binding domains positioned at both the N and C-termini have superior binding and T cell activity than monovalent constructs containing only a single monovalent antigen-binding domain. Furthermore, without wishing to be bound by theory, positioning one of the sdAbs C-terminal to the CD3 binding domain may form a more optimal immune synapse compared to constructs wherein the sdAbs are only positioned N-terminal to the Fc as the latter may increase the immune synapse distance.

### Example 13: Assessment of CD3 Constrained MultispecificConstructs Containing B7H3-Targeting sdAb and Fab Domains

[0903] Constructs containing either B7H3-targeted sdAb(s) or a Fab as the tumor-associated antigen-binding domain were assessed for T-cell activating activity. Activity of B7H3-targeted constrained CD3 engaging constructs that were formatted with anti-B7H3 sdAbs (e.g. cx5952 and cx6079) or anti-B7H3 MAB constructs formatted with a Fab (e.g. cx5067, cx6083 or cx6084) as the antigen-binding domain(s) were assessed (see FIGS. 30A and 30C and Table E5). All tested constructs, except cx6079 and cx5067, contained a disulfide-stabilized anti-CD3 Fv (dsFv) containing an interchain disulfide bond created by the modification of anti-CD3 VH G44C paired with VL G100C. The anti-CD3 Fv of cx5067, designated MAB-Fv, and the anti-CD3 Fv of cx6079, designated sdAb-Fc-Fv, were not disulfide-stabilized. Additionally, cx5952 was engineered to contain two distinct B7H3-targeting sdAb domains, with one located N-terminal to the Fc domain and one located C-terminal to the CD3-binding domain. By contrast, cx6079 was engineered to contain two identical B7H3-targeting sdAb domains, both located N-terminal to the Fc domain. The Fvs of all three Fab constructs were engineered to be N-terminal to the Fc domain.

### A. Cytotoxicity

[0904] Cytotoxicity of B7H3-targeted CD3 constrained binding constructs was assessed substantially as described in Example 11. Cytotoxicity was assessed against a melanoma cell line, A375, and a T-cell acute lymphoblastic leukemia cell line, CCRF-CEM, which were used as B7H3 positive and negative cell lines, respectively. As shown in FIG. 40A the exemplary constrained CD3 engaging constructs formatted with B7H3-targeting sdAbs, cx5952 and cx6079, were superior at eliciting antigen-dependent T-cell cytotoxicity compared to to the anti-B7H3 MAB constructs formatted with a Fab, cx5067, cx6083, and cx6084. Notably, cx5952 was more potent than cx6079, suggesting the positioning of the B7H3-targeting sdAb C-terminal to the anti-CD3 binding domain and/or the stabilization of the anti-CD3 FV via engineered disulfide contributed to this enhanced activity. In these assays, no cytotoxicity was observed in the presence of B7H3-negative CRF-CEM cells target cells, as shown in FIG. 40B.

### B. T Cell Modulation

[0905] To further assess T cell modulation, exemplary multispecific CD3 constrained binding constructs were assessed by monitoring the ability of the constructs to modulate T cell activation markers, substantially as described in Example 11. To assess T cell activation, suspension cells from T cell cytotoxicity assays above, involving culture of T cells with B7H3 positive cells (A375) or B7H3 negative cells (CCRF-CEM) in the presence of an exemplary B7H3-targeted constrained CD3 engaging constructs, were collected. Tested constructs included anti-B7H3 constructs formatted with sdAbs (e.g. cx5952 and cx6079) and anti-B7H3 constructs formatted with a Fab (e.g. cx5067, cx6083 and cx6084)

[0906] Cells were stained with a live/dead stain and fluorophore-conjugated anti-CD4, anti-CD8, anti-CD25 and/or anti-CD71 antibodies. Cells were analyzed using a SONY SA3800 spectral analyzer and CD4+ or CD8+ T cell activation was determined by measuring expression levels of CD25 or CD71 or percent CD25- or CD71-positive cells.

[0907] Results are shown for CD25 expression (FIG. 40C-F) and CD71 expression (FIG. 40G-J) on CD4+ and CD8+ T cells following the co-culture with B7H3 positive cells (A375) or B7H3 negative cells (CCRF-CEM) in the presence of the described constructs. The results showed that cx5952 mediated a dose-dependent B7H3-dependent T-cell activation via CD3 binding, as evidenced by increased expression of CD25 and CD71 in CD4+ and CD8+ T cells. cx5952 was the most potent over other B7H3-targeted constrained CD3 engaging constructs at inducing T-dependent T-cell activation.

### C. T Cell Cytokine Production

[0908] Supernatants from T cell cytotoxicity tumor cell co-culture assays, involving co-culture of T cells with B7H3 positive, A375 or negative, CCRF-CEM cells in the presence of cx5952, cx6079, cx6083, cx6084 or cx5067, were analyzed for IFNγ content by sandwich ELISA. A standard curve was generated from which cytokine concentration values of supernatant samples were interpolated. Samples that had absorbance values below the lower limit of detection were assigned a cytokine concentration equal to half that of the lowest standard concentration. As shown in FIG. 40K, the representative sdAb-Fc-dsFV-sdAb construct, cx5952, was superior to the tested B7H3-targeted FAB containing constructs, cx6083, cx6084 and cx5067 at eliciting target-dependent cytokine release from activated T-cells. The increase in cytokine production was target dependent as it was not observed in the presence of B7H3 negative CCRF-CEM cells (FIG. 40L). This is consistent with the findings from the antigen dependent cytotoxicity and activation assays. Importantly, the MAB-dsFV constructs, cx6083 and cx6084 were superior to the MAB-FV construct, cx5067, demonstrating the importance of interdomain disulfide stabilizing modification for enhancing T-cell function.

### D. Summary

[0909] Together, these results demonstrate that constrained anti-CD3 constructs formatted with anti-B7H3 sdAb binding domains were superior at eliciting antigen-dependent T-cell cytotoxicity compared to the anti-B7H3 MAB constructs formatted with a Fab B7H3 binding domain. Further, that cx5952 was more potent than cx6079 suggested that the positioning of the B7H3-targeting sdAb C-terminal to the CD3 binding domain, the stabilization of the anti-CD3 FV via engineered disulfide, or both, contribute to enhanced activity. Without wishing to be bound by theory, positioning one of the sdAbs C-terminal to the CD3 binding domain may form a more optimal immune synapse compared to constructs wherein the sdAbs are only positioned N-terminal to the Fc as the latter may increase the immune synapse distance.

### Example 14: Comparison of Orientation of CD3 Binding Region in CD3-constrained Multispecific Constructs Containing B7H3-Targeting Domains

[0910] Additional B7H3-targetig multispecific polypeptide constructs were generated containing an Fv as a CD3 binding region in which the VH or VL of the anti-CD3 Fv in the constructs was positioned C-terminally to either the Fc-knob or Fc-hole of the heterodimeric Fc region. The generated CD3-constrained multispecific polypeptide constructs were assessed for the ability to activate T cells via CD3 engagement in a T cell reporter assay.

### A. Design and Generation of Constructs

[0911] The multispecific constructs were generated as shown in FIGS. 41A-B, to contain a heterodimeric Fc region of an immunoglobulin coupled by a linker (e.g. a non-cleavable linker) to the CD3 binding region, a 4-1BB antigen binding domain (e.g. sdAb, containing a CDR1, a CDR2 and a CDR3 set forth in SEQ ID Nos: 468, 469 and 470, respectively; e.g. SEQ ID NO:400) as a CRBR positioned carboxy-terminally relative to the CD3 binding region, and dual antigen binding domains that bind the B7H3 tumor associated antigen (TAA) positioned amino-terminally relative to the Fc region and carboxy-terminally relative to the CD3 binding region of the multispecific polypeptide construct.

[0912] Polynucleotides encoding at least a first polypeptide chain and a second polypeptide chain of the heterodimeric multispecific polypeptide construct were generated and cloned into a plasmid for expression. The first polypeptide chain generally included in order, from the N-terminus to C-terminus, a first Fc polypeptide (e.g. an Fc hole polypeptide); a non-cleavable linker; a variable light (VL; e.g. cx5187) or variable heavy (VH; e.g. cx5841) domain of an anti-CD3 antibody; and a 4-1BB binding domain (e.g. sdAb) as a CRBR. The second polypeptide chain generally included in order, from the N-terminus to C-terminus, a first B7H3 antigen binding domain (e.g. B7H3 sdAb #1), a second Fc polypeptide (e.g. an Fc knob polypeptide); the same linker as the first polypeptide chain; the other of the variable heavy (VH) or variable light (VL) domain of an anti-CD3 antibody; and a second B7H3 antigen binding domain (e.g. B7H3 sdAb #2). The anti-CD3 antibody included a disulfide-stabilized (dsFv) antibody (anti-CD3 VH with the mutation G44C and VL with the mutation G100C).

[0913] Notably, as shown in FIGS. 41A-B, the orientation of the anti-CD3 VH and anti-CD3 VL of the CD3 Fv were positioned differently relative to the Fc knob or Fc hole of the heterodimeric Fc region. As shown in FIG. 41A, cx5841 was generated in which the first polypeptide of the heterodimeric construct had the VL of CD3 Fv positioned C-terminal to the Fc knob and B7H3 binding domain on the extreme N and C-termini and the second polypepide of the heterodimeric construct had the VH of CD3 Fv positioned C-terminal to the Fc Hole and a 41BB binding on the extreme C-termini. In constrast, FIG. 41B depicts the exemplary construct cx5187 (described in Example 9) in which the first polypeptide of the heterodimeric construct had the VH of CD3 Fv positioned C-terminal to the Fc knob and B7H3 binding domain on the extreme N and C-termini and the second polypepide of the heterodimeric construct had the VL of CD3 Fv positioned C-terminal to the Fc Hole and a 41BB binding on the extreme C-termini

[0914] Components of the exemplary generated constrained CD3 binding constructs are shown in Table E6. The constructs were expressed and purified substantially as described in Example 9.

TABLE E6
Exemplary constrained CD3 engaging constructs containing B7H3-targeting domain

| | | N-term | | | CD3 | C-term | |
|---|---|---|---|---|---|---|---|
| Construct | | sdAb | | | Binding | sdAb | Disulfide |
| ID | Chain | (Target) | Fc | Linker | Domain | (Target) | Stabilized |
| cx5841 | 1 | B7H3 | xELL- | GGGGGSGGGGG | VL10 | B7H3 sdAb | yes |
| | | sdAb 4 | Knob | SGGGGGS (SEQ | (SEQ ID | 3 | |
| | | hz1A5v5 | (SEQ ID | ID NO: 317) | NO: 265) | hz58E05v48 | |
| | | 1 (SEQ | NO: 295, | | | (SEQ ID | |
| | | ID | 299) | | | NO: 85) | |
| | | NO: 467) | | | | | |
| | 2 | None | xELL- | GGGGGSGGGGG | VH13 | Co-stim | |
| | | | Hole | SGGGGGS (SEQ | (SEQ ID | Recept or | |
| | | | (SEQ ID | ID NO: 317) | NO: 237) | sdAb (e.g. | |
| | | | NO: 302, | | | SEQ ID | |
| | | | 304) | | | NO: 400) | |
| cx5187 | 1 | B7H3 | xELL- | GGGGGSGGGGG | VH13 | B7H3 sdAb | yes |
| | | sdAb 4 | Knob | SGGGGGS (SEQ | (SEQ ID | 3 | |
| | | hz1A5v5 | (SEQ ID | ID NO: 317) | NO: 237) | hz58E05v48 | |
| | | 1 (SEQ | NO: 295, | | | (SEQ ID | |
| | | ID | 299) | | | NO: 85) | |
| | | NO: 467) | | | | | |
| | 2 | None | xELL- | GGGGGSGGGGG | VL10 | Co-stim | |
| | | | Hole | SGGGGGS (SEQ | (SEQ ID | Recept or | |
| | | | (SEQ ID | ID NO: 317) | NO: 265) | sdAb (e.g. | |
| | | | NO: 302, | | | SEQ ID | |
| | | | 304) | | | NO: 400) | |

### B. T Cell Reporter Activity

[0915] To compare CD3 engagement, the exemplary constructs were tested in an antigen-dependent CD3 reporter assay by assessing their ability to activate a CD3 NFAT reporter Jurkat cell line in a co-culture with target antigen-expressing cells. Activation was assessed by monitoring either green fluorescent or luciferase reporter signal in Jurkat reporter cells.

[0916] The B7H3-targeting constrained CD3 engaging constructs were titrated onto co-cultures of either A375 cells expressing B7H3 or control CCRF-CEM cells not expressing B7H3, and engineered Jurkat cells that express NFAT-driven green fluorescence protein (GFP). Engagement of CD3 results in NFAT signaling and production of green fluorescence. For reporter assays utilizing adherent target cells, target cells were seeded, allowed to settle at room temperature for uniform distribution, and incubated for several hours at 37° C. to permit adherence prior to addition of reporter cells and antigen targeting constrained CD3 engaging constructs. Assay plates were serially imaged using an IncuCyte ZOOM system and CD3 reporter cell activation was determined by measuring total green object integrated intensity.

[0917] As shown in FIG. 42A, the exemplary B7H3-targeted constrained CD3 engaging constructs exhibited capacity to mediate target antigen specific T-cell activation when incubated in reporter T cell co-cultures in the presence of B7H3-expressing target cells. Reporter activity, however, was not observed in co-cultures with cells not expressing B7H3 (FIG. 42B). Notably, cx5187 with the Knob-VH; Hole-VL format displayed enhanced T cell activation compared to cx5841 with the Knob-VL; Hole-VH format.

[0918] In a similar assay, the same B7H3-targeting constrained CD3 engaging constructs were titrated onto co-cultures of either A375 cells expressing B7H3 or control CCRF-CEM cells not expressing B7H3, and engineered Jurkat cells that express NFAT-driven luciferase. As shown in FIG. 42C, the exemplary B7H3-targeted constrained CD3 engaging constructs exhibited capacity to mediate target antigen specific T-cell activation when incubated in reporter T cell co-cultures in the presence of B7H3-expressing target cells. Again, reporter activity, was not observed in co-cultures with cells not expressing B7H3 (FIG. 42D). As in the GFP reporter assay, the construct with the Knob-VH; Hole-VL format (cx5187) displayed enhanced T cell activation compared to the construct with the Knob-VL; Hole-VH format (cx5841).

[0919] These results are consistent with an observation that enhanced CD3 engagement and activity is observed when the components of the CD3 Fv are oriented so that the VH and VL are positioned C-terminally to the Fc Knob and Fc Hole regions, respectively.

### Example 15: Epitope Binning of B7H3 sdAbs

[0920] The ability of various B7H3 sdAbs to bind distinct eptitopes was assessed by Bio-Layer Interferometry (BLI) using a ForteBio Octet system with streptavidin coated sensor and biotinylated recombinant B7H3 extracellular domain. Exemplary B7H3 sdAbs were pairwise for blocking of another's binding to the epitope of an antigen. Results are set forth below in Table E7.

| Bin 1 | Bin 2 | Bin 3 | Bin 4 |
|---|---|---|---|
| 58E05 | 57B04 | 57B06 | 57B10 |
| | 1A5 | 57H12 | |
| | 1H5 | 58B06 | |
| | | 57A12 | |
| | | 57D01 | |

[0921] The present invention is not intended to be limited in scope to the particular disclosed embodiments, which are provided, for example, to illustrate various aspects of the invention. Various modifications to the compositions and methods described will become apparent from the description and teachings herein. Such variations may be practiced without departing from the true scope and spirit of the disclosure and are intended to fall within the scope of the present disclosure.

### Sequences

| # | SEQUENCE | ANNOTATION |
|---|---|---|
| 1 | QLQLQESGGGLVQAGDSLRLSCAASGFSFGSNVMMWVRQAP | L1A5 |
| | GKGPEWVSTIYSSGTGTFYADSVKGRFTISRNNAKNTLYLQMN | |
| | SLKPDDTAVYYCATSGPVRGWGPRSQGTLVTVKP | |
| 2 | EVQLVESGGGEVQPGGSLRLSCAASGFSFGSNVMMWVRQAPG | hz1A5v1 |
| | KGPEWVSTIYSSGTGTFYAESVKGRFTISRDNAKNTLYLQMSSL | |
| | RAEDTAVYYCATSGPVRGWGPRSQGTLVTVKPGG | |
| 3 | EVQLVESGGGEVQPGGSLRLSCAASGFSFGSNVMMWVRQAPG | hz1A5v2 |
| | KGPEWVSTIYSSGTGTFYAESVKGRFTISRNNAKNTLYLQMSSL | |
| | RAEDTAVYYCATSGPVRGWGPRSQGTLVTVKPGG | |
| 4 | EVQLVESGGGEVQPGGSLRLSCAASGFSFGSNVMMWVRQAPG | hz1A5v3 |
| | KGPEWVSTIYSSGTGTFYAESVKGRFTISRNNAKNTLYLQMSSL | |
| | RAEDTAVYYCATSGPVRGWGPRGQGTLVTVKPGG | |
| 5 | EVQLVESGGGEVQPGGSLRLSCAASGFSFGSNVMMWVRQAPG | hz1A5v7 |
| | KGPEWVSTIYSSGTGTFYAESVKGRFTISRNNAKNTLYLQMSSL | |
| | KPDDTAVYYCATSGPVRGWGPRSQGTLVTVKPGG | |
| 6 | EVQLVESGGGLVQAGDSLRLSCAASGFSFGSNVMMWVRQAP | hz1A5v8 |
| | GKGPEWVSTIYSSGTGTFYAESVKGRFTISRNNAKNTLYLQMS | |
| | SLRAEDTAVYYCATSGPVRGWGPRSQGTLVTVKPGG | |
| 7 | EVQLVESGGGEVQPGGSLRLSCAASGFSFGSNVMMWVRQAPG | hz1A5v9 |
| | KGPEWVSTIYSRGTGTFYAESVKGRFTISRNNAKNTLYLQMSS | |
| | LRAEDTAVYYCATSGPVRGWGPRSQGTLVTVKPGG | |
| 8 | EVQLVESGGGEVQPGGSLRLSCAASGFSFGSNVMMWVRQAPG | hz1A5v12 |
| | KGPEWVSTIYSSGTGTFYAESVKGRFTISRDNAKNTLYLQMSSL | |
| | RAEDTAVYYCATSGPVRGWGPWSQGTLVTVKP | |
| 9 | EVQLVESGGGEVQPGGSLRLSCAASGFSFGSNVMMWVRQAPG | hz1A5v17 |
| | KGPEWVSTIYSRGTGTFYAESVKGRFTISRDNAKNTLYLQMSS | |
| | LRAEDTAVYYCATSGPVRGWGPRSQGTLVTVKP | |
| 10 | EVQLVESGGGEVQPGGSLRLSCAASGFSFGSNVMMWVRQAPG | hz1A5v24 |
| | KGPEWVSTIYSSGTGTFYAESVKGRFTISRDNAKNTLYLQMSSL | |
| | RAEDTAVYYCATSGPVRGWGPRTQGTLVTVKP | |
| 11 | EVQLVESGGGEVQPGGSLRLSCAASGFSFGSNVMMWVRQAPG | hz1A5v25 |
| | KGLEWVSTIYSSGTGTFYAESVKGRFTISRDNAKNTLYLQMSS | |
| | LRAEDTAVYYCATSGPVRGWGPRSQGTLVTVKP | |
| 12 | EVQLVESGGGEVQAGGSLRLSCAASGFSFGSNVMMWVRQAP | hz1A5v28 |
| | GKGPEWVSTIYSSGTGTFYAESVKGRFTISRDNAKNTLYLQMS | |
| | SLRAEDTAVYYCATSGPVRGWGPRSQGTLVTVKP | |
| 13 | EVQLVESGGGEVQPGGSLRLSCAASGFSFGSNVMMWVRQAPG | hz1A5v29 |
| | KGLEWVSTIYSSGTGTFYAESVKGRFTISRDNAKNTLYLQMSS | |
| | LRAEDTAVYYCATSGPVRGWGPRTQGTLVTVKP | |
| 14 | EVQLVESGGGEVQPGGSLRLSCAASGFSFGSNVMMWVRQAPG | hz1A5v30 |
| | KGLEWVSTIYSRGGSTFYAESVKGRFTISRDNAKNTLYLQMSS | |
| | LRAEDTAVYYCATSGPVRGWGPRSQGTLVTVKP | |
| 15 | EVQLVESGGGEVQPGGSLRLSCAASGFSFGSNVMMWVRQAPG | hz1A5v31 |
| | KGLEWVSTIYSSGTGTYYAESVKGRFTISRDNAKNTLYLQMSS | |
| | LRAEDTAVYYCATSGPVRGWGPRSQGTLVTVKP | |
| 16 | EVQLVESGGGEVQPGGSLRLSCAASGFSFGSNVMMWVRQAPG | hz1A5v32 |
| | KGLEWVSTIYSRGGSTYYAESVKGRFTISRDNAKNTLYLQMSS | |
| | LRAEDTAVYYCATSGPVRGWGPRSQGTLVTVKP | |
| 17 | EVQLVESGGGEVQPGGSLRLSCAASGFSFGSNVMMWVRQAPG | hz1A5v33 |
| | KGLEWVSTIYSRGTGTFYAESVKGRFTISRDNAKNTLYLQMSS | |
| | LRAEDTAVYYCATSGPVRGWGPRSQGTLVTVKP | |
| 18 | EVQLVESGGGEVQPGGSLRLSCAASGFSFGSNVMMWVRQAPG | hz1A5v34 |
| | KGREWVSTIYSSGTGTFYAESVKGRFTISRDNAKNTLYLQMSS | |
| | LRAEDTAVYYCATSGPVRGWGPRSQGTLVTVKP | |
| 19 | EVQLVESGGGEVQPGGSLRLSCAASGFSFGSYVMMWVRQAPG | hz1A5v35 |
| | KGLEWVSTIYSSGTGTFYAESVKGRFTISRDNAKNTLYLQMSS | |
| | LRAEDTAVYYCATSGPVRGWGPRSQGTLVTVKP | |
| 20 | EVQLVESGGGEVQPGGSLRLSCAASGFSFGSFVMMWVRQAPG | hz1A5v36 |
| | KGLEWVSTIYSSGTGTFYAESVKGRFTISRDNAKNTLYLQMSS | |
| | LRAEDTAVYYCATSGPVRGWGPRSQGTLVTVKP | |
| 21 | EVQLVESGGGEVQPGGSLRLSCAASGFTFGSNVMMWVRQAPG | hz1A5v37 |
| | KGIEWVSTIYSSGTGTFYAESVKGRFTISRDNAKNTLYLQMSSL | |
| | RAEDTAVYYCATSGPVRGWGPRSQGTLVTVKP | |
| 22 | EVQLVESGGGEVQPGGSLRLSCAASGFSFGSNVMMWVRQAPG | hz1A5v38 |
| | KGLEWVSTIYSSGTGTFYAESVKGRFTISRDNAKNTLYLQMSS | |
| | LRAEDTAVYYCATSGPVRGWGYRSQGTLVTVKP | |
| 23 | EVQLVESGGGEVQPGGSLRLSCAASGFSFSSNVMMWVRQAPG | hz1A5v39 |
| | KGLEWVSTIYSSGTGTFYAESVKGRFTISRDNAKNTLYLQMSS | |
| | LRAEDTAVYYCATSGPVRGWGPRSQGTLVTVKP | |
| 24 | EVQLVESGGGEVQPGGSLRLSCAASGFSFTSNVMMWVRQAPG | hz1A5v40 |
| | KGLEWVSTIYSSGTGTFYAESVKGRFTISRDNAKNTLYLQMSS | |
| | LRAEDTAVYYCATSGPVRGWGPRSQGTLVTVKP | |
| 25 | EVQLVESGGGEVQPGGSLRLSCAPSGFSFGSNVMMWVRQAPG | hz1A5v41 |
| | KGLEWVSTIYSRGTGTFYAESVKGRFTISRDNAKNTLYLQMSS | |
| | LRAEDTAVYYCATSGPVRGWGPRSQGTLVTVKP | |
| 26 | EVQLVESGGGEVQPGGSLRLSCGPSGFSFGSNVMMWVRQAPG | hz1A5v42 |
| | KGLEWVSTIYSRGTGTFYAESVKGRFTISRDNAKNTLYLQMSS | |
| | LRAEDTAVYYCATSGPVRGWGPRSQGTLVTVKP | |
| 27 | EVQLVESGGGEVQPGGSLRLSCAASGFSFGSNVMMWVRQAPG | hz1A5v43 |
| | KGLEWVSTIYSRGTGTFYAESVKGRFTISRDNAKNTLYLQMSS | |
| | LRPEDTAVYYCATSGPVRGWGPRSQGTLVTVKP | |
| 28 | EVQLVESGGGEVQPGGSLRLSCAASGFSFGSNVMMWVRQAPG | hz1A5v44 |
| | KGLEWVSTIYSRGTGTYYAESVKGRFTISRDNAKNTLYLQMSS | |
| | LRAEDTAVYYCATSGPVRGWGPRSQGTLVTVKP | |
| 29 | EVQLVESGGGEVQPGGSLRLSCAASGFSFGSYVMMWVRQAPG | hz1A5v45 |
| | KGLEWVSTIYSRGTGTFYAESVKGRFTISRDNAKNTLYLQMSS | |
| | LRAEDTAVYYCATSGPVRGWGPRSQGTLVTVKP | |
| 30 | EVQLVESGGGEVQPGGSLRLSCAASGFTFGSNVMMWVRQAPG | hz1A5v46 |
| | KG1EWVSTIYSRGTGTFYAESVKGRFTISRDNAKNTLYLQMSSL | |
| | RAEDTAVYYCATSGPVRGWGPRSQGTLVTVKP | |
| 31 | EVQLVESGGGEVQPGGSLRLSCAASGFSFSSNVMMWVRQAPG | hz1A5v47 |
| | KGLEWVSTIYSRGTGTFYAESVKGRFTISRDNAKNTLYLQMSS | |
| | LRAEDTAVYYCATSGPVRGWGPRSQGTLVTVKP | |
| 32 | EVQLVESGGGEVQPGGSLRLSCAASGFSFGSYVMMWVRQAPG | hz1A5v48 |
| | KGLEWVSTIYSRGTGTYYAESVKGRFTISRDNAKNTLYLQMSS | |
| | LRAEDTAVYYCATSGPVRGWGPRSQGTLVTVKP | |
| 33 | EVQLVESGGGEVQPGGSLRLSCAASGFTFSSNVMMWVRQAPG | hz1A5v49 |
| | KGLEWVSTIYSRGTGTFYAESVKGRFTISRDNAKNTLYLQMSS | |
| | LRAEDTAVYYCATSGPVRGWGPRSQGTLVTVKP | |
| 34 | EVQLVESGGGEVQPGGSLRLSCAASGFTFSSYVMMWVRQAPG | hz1A5v50 |
| | KGLEWVSTIYSRGTGTYYAESVKGRFTISRDNAKNTLYLQMSS | |
| | LRAEDTAVYYCATSGPVRGWGPRSQGTLVTVKP | |
| 35 | EVQLVQSGGGLVQAGDSLRLSCAPSERTFSTYTMGWFRQAPG | L57B04 |
| | KEREFVAVVNWSGGSKYYADSVKGRFTISRDNAKNAVYLHM | |
| | NSLKPEDTGVYYCAAGGAYSGPYYDTRQYTYWGQGTQVTVK | |
| | P | |
| 36 | EVQLVESGGGEVQPGGSLRLSCAASERTFSTYTMGWFRQAPG | hz57B04v3 |
| | KEREFVSVVNWSGGSKYYAESVKGRFTISRDNAKNTVYLQMN | |
| | SLRAEDTAVYYCAAGGAYSGPYYDTRQYTYWGQGTLVTVKP | |
| | GG | |
| 37 | EVQLVESGGGEVQPGGSLRLSCAASERTFSTYTMGWFRQAPG | hz57B04v4 |
| | KEREFVAVVNWSGGSKYYAESVKGRFTISRDNAKNTVYLQMN | |
| | SLRAEDTAVYYCAAGGAYSGPYYDTRQYTYWGQGTLVTVKP | |
| | GG | |
| 38 | EVQLVESGGGEVQPGGSLRLSCAPSERTFSTYTMGWFRQAPGK | hz57B04v8 |
| | EREFVAVVNWSGGSKYYAESVKGRFriSRDNAKNTVYLQMNS | |
| | LRAEDTAVYYCAAGGAYSGPYYDTRQYTYWGQGTLVTVKPG | |
| | G | |
| 39 | EVQLVESGGGEVQPGGSLRLSCAASERTFSTYTMGWFRQAPG | hz57B04v9 |
| | KEREFVAVVNWSGGSKYYAESVKGRFTISRDNAKNTVYLHMN | |
| | SLRAEDTAVYYCAAGGAYSGPYYDTRQYTYWGQGTLVTVKP | |
| | GG | |
| 40 | EVQLVESGGGEVQPGGSLRLSCAPSERTFSTYTMGWFRQAPGK | hz57B04v15 |
| | EREFVAVVNWGGGSKYYAESVKGRFTISRDNAKNTVYLQMNS | |
| | LRAEDTAVYYCAAGGAYSGPYYDTRQYTYWGQGTLVTVKP | |
| 41 | EVQLVESGGGEVQPGGSLRLSCAPSERTFSTYTMGWFRQAPGK | hz57B04v20 |
| | EREFVAVVNWGGGSKYYAESVKGRFTISRDNAKNTVYLQMNS | |
| | LRAEDTAVYYCAAGGAYSTPYYDTRQYTYWGQGTLVTVKP | |
| 42 | EVQLVESGGGEVQPGGSLRLSCAPSERTFSTYTMGWFRQAPGK | hz57B04v23 |
| | EREFVAVVNWSGGSKYYAESVKGRFTISRDNAKNTVYLQMSS | |
| | LRAEDTAVYYCAAGGAYSGPYYDTRQYTYWGQGTLVTVKPG | |
| | G | |
| 43 | EVQLVESGGGEVQPGGSLRLSCAPSERTFSTYTMGWFRQAPGK | hz57B04v24 |
| | EREFVAVVNWGGGSKYYAESVKGRFTISRDNAKNTVYLQMSS | |
| | LRAEDTAVYYCAAGGAYSGPYYDTRQYTYWGQGTLVTVKPG | |
| | G | |
| 44 | EVQLVQSGGGLVQAGGSLRLSCAASGSTFSMYHMSWFRQAPG | L58E05 |
| | KQREPVATSHHGGTTNYAGSVKGRFTIFRDNAKNTVYLQMNS | |
| | LKPEDTGVYYCKADHGYNGRGYWGQGTQVTVKP | |
| 45 | EVQLVESGGGEVQPGGSLRLSCAASGSTFSMYHMSWFRQAPG | hz58E05v1 |
| | KGREPVSTSHHGGTTNYAESVKGRFTISRDNAKNTLYLQMNSL | |
| | RAEDTAVYYCKADHGYNGRGYWGQGTLVTVKPGG | |
| 46 | EVQLVESGGGEVQPGGSLRLSCAASGSTFSMYHMSWFRQAPG | hz58E05v2 |
| | KQREPVSTSHHGGTTNYAESVKGRFTISRDNAKNTLYLQMNSL | |
| | RAEDTAVYYCKADHGYNGRGYWGQGTLVTVKPGG | |
| 47 | EVQLVESGGGEVQPGGSLRLSCAASGSTFSMYHMSWFRQAPG | hz58E05v3 |
| | KQREPVSTSHHGGTTNYAESVKGRFTISRDNAKNTVYLQMNSL | |
| | RAEDTAVYYCKADHGYNGRGYWGQGTLVTVKPGG | |
| 48 | EVQLVESGGGEVQPGGSLRLSCAASGSTFSMYHMSWFRQAPG | hz58E05v4 |
| | KQREPVATSHHGGTTNYAESVKGRFTISRDNAKNTVYLQMNS | |
| | LRAEDTAVYYCKADHGYNGRGYWGQGTLVTVKPGG | |
| 49 | EVQLVESGGGEVQPGGSLRLSCAASGSTFSMYHMSWFRQAPG | hz58E05v5 |
| | KQREPVATSHHGGTTNYAESVKGRFTISRDNAKNTVYLQMNS | |
| | LRAEDTAVYYCKADHGYQGRGYWGQGTLVTVKPGG | |
| 50 | EVQLVESGGGEVQPGGSLRLSCAASGSTFSMYHMSWFRQAPG | hz58E05v6 |
| | KQREPVATSHHGGTTNYAESVKGRFTISRDNAKNTVYLQMNS | |
| | LRAEDTAVYYCKADHGYNARGYWGQGTLVTVKPGG | |
| 51 | EVQLVESGGGEVQPGGSLRLSCAASGSTFSMYHMSWFRQAPG | hz58E05v7 |
| | KQREPVATSHHGGTTNYAESVKGRFTISRDNAKNTVYLQMNS | |
| | LRAEDTAVYYCKADHGYNTRGYWGQGTLVTVKPGG | |
| 52 | EVQLVESGGGEVQPGGSLRLSCAASGSTFSMYHMSWFRQAPG | hz58E05v8 |
| | KQREPVATSHHGGTTNYAGSVKGRFTISRDNAKNTVYLQMNS | |
| | LRAEDTAVYYCKADHGYNGRGYWGQGTLVTVKPGG | |
| 53 | EVQLVESGGGEVQPGGSLRLSCAASGSTFSMYHMSWFRQAPG | hz58E05v9 |
| | KQREPVATSHHGGTTNYAESVKGRFTISRDNAKNTLYLQMNS | |
| | LRAEDTAVYYCKADHGYQGRGYWGQGTLVTVKPGG | |
| 54 | EVQLVESGGGEVQPGGSLRLSCAASGSTFSMYHMSWFRQAPG | hz58E05v10 |
| | KQREPVATSHHGGTTNYAESVKGRFTISRDNAKNTLYLQMNS | |
| | LRAEDTAVYYCKADHGYNARGYWGQGTLVTVKPG | |
| 55 | EVQLVESGGGEVQPGGSLRLSCAASGSTFSMYHMSWFRQAPG | hz58E05v11 |
| | KQREPVATSHHGGTTNYAESVKGRFTISRDNAKNTLYLQMNS | |
| | LRAEDTAVYYCKADHGYNTRGYWGQGTLVTVKPG | |
| 56 | EVQLVESGGGEVQPGGSLRLSCAASGSTFSMYHMSWFRQAPG | hz58E05v13 |
| | KQREPVSTSHHGGTTNYAESVKGRFTISRDNAKNTLYLQMNSL | |
| | RAEDTAVYYCKADHGYQGRGYWGQGTLVTVKP | |
| 57 | EVQLVESGGGEVQPGGSLRLSCAASGSTFSLYHMSWFRQAPG | hz58E05v16 |
| | KQREPVATSHHGGTTNYAGSVKGRFTISRDNAKNTVYLQMNS | |
| | LRAEDTAVYYCKADHGYQGRGYWGQGTLVTVKP | |
| 58 | EVQLVESGGGEVQPGGSLRLSCAASGSTFSSYHMSWFRQAPGK | hz58E05v18 |
| | QREPVATSHHGGTTNYAGSVKGRFTISRDNAKNTVYLQMNSL | |
| | RAEDTAVYYCKADHGYQGRGYWGQGTLVTVKP | |
| 59 | EVQLVESGGGEVQPGGSLRLSCAASGSTFSMYHMSWFRQAPG | hz58E05v19 |
| | KEREPVATSHHGGTTNYAGSVKGRFTISRDNAKNTVYLQMNS | |
| | LRAEDTAVYYCKADHGYQGRGYWGQGTLVTVKP | |
| 60 | EVQLVESGGGEVQPGGSLRLSCAASGSTFSTYHMSWFRQAPG | hz58E05v20 |
| | KQREPVATSHHGGTTNYAGSVKGRFTISRDNAKNTVYLQMNS | |
| | LRAEDTAVYYCKADHGYQGRGYWGQGTLVTVKP | |
| 61 | EVQLVESGGGEVQPGGSLRLSCAASGSTFSKYHMSWFRQAPG | hz58E05v21 |
| | KQREPVATSHHGGTTNYAGSVKGRFTISRDNAKNTVYLQMNS | |
| | LRAEDTAVYYCKADHGYQGRGYWGQGTLVTVKP | |
| 62 | EVQLVESGGGEVQPGGSLRLSCAASGSTFSFYHMSWFRQAPGK | hz58E05v22 |
| | QREPVATSHHGGTTNYAGSVKGRFTISRDNAKNTVYLQMNSL | |
| | RAEDTAVYYCKADHGYQGRGYWGQGTLVTVKP | |
| 63 | EVQLVESGGGEVQPGGSLRLSCAASGSTFSDYHMSWFRQAPG | hz58E05v23 |
| | KQREPVATSHHGGTTNYAGSVKGRFTISRDNAKNTVYLQMNS | |
| | LRAEDTAVYYCKADHGYQGRGYWGQGTLVTVKP | |
| 64 | EVQLVESGGGEVQPGGSLRLSCAASGSTFSRYHMSWFRQAPG | hz58E05v24 |
| | KQREPVATSHHGGTTNYAGSVKGRFTISRDNAKNTVYLQMNS | |
| | LRAEDTAVYYCKADHGYQGRGYWGQGTLVTVKP | |
| 65 | EVQLVESGGGEVQPGGSLRLSCAASGSTFSMYHMSWFRQAPG | hz58E05v25 |
| | KQREPVATSHHGGTTNYAGSVKGRFTISRDNAKNTVYLQMSS | |
| | LRAEDTAVYYCKADHGYQGRGYWGQGTLVTVKP | |
| 66 | EVQLVESGGGEVQPGGSLRLSCAASGSTFSMYHMSWFRQAPG | hz58E05v26 |
| | KQREPVATSHHGGTTNYAGSVKGRFTISRDNAKNTVYLQMNT | |
| | LRAEDTAVYYCKADHGYQGRGYWGQGTLVTVKP | |
| 67 | EVQLVESGGGEVQPGGSLRLSCAASGSTFSSYHMSWFRQAPGK | hz58E05v27 |
| | QREPVATSHHGGTTNYAGSVKGRFTISRDNAKNTVYLQMNTL | |
| | RAEDTAVYYCKADHGYQGRGYWGQGTLVTVKP | |
| 68 | EVQLVESGGGEVQPGGSLRLSCAASGSTFSMYHMSWFRQAPG | hz58E05v28 |
| | KQREPVATSHHGGTTNYAGSVKGRFTIFRDNAKNTVYLQMNS | |
| | LRAEDTAVYYCKADHGYNGRGYWGQGTLVTVKP | |
| 69 | EVQLVESGGGEVQPGGSLRLSCAASGSTFSMYHMSWFRQAPG | hz58E05v29 |
| | KQREPVATSHHGGTTNYAGSVKGRFTISRDNAKNTVYLQMNS | |
| | LKPEDTGVYYCKADHGYNGRGYWGQGTLVTVKP | |
| 70 | EVQLVESGGGEVQPGGSLRLSCAASGSTFSMYHMSWFRQAPG | hz58E05v30 |
| | KQREPVATSHHGGTTNYAGSVKGRFTISRDNAKNTVYLQMNS | |
| | LRPEDTAVYYCKADHGYNGRGYWGQGTLVTVKP | |
| 71 | EVQLVESGGGEVQPGGSLRLSCAASGSTFSMYHMSWFRQAPG | hz58E05v31 |
| | KQREPVATSHHGGTTNYAGSVKGRFTISRDNAKNTVYLQMNS | |
| | LRPEDTAVYYCKADHGYQGRGYWGQGTLVTVKP | |
| 72 | EVQLVESGGGEVQPGGSLRLSCAASGSTFSSYHMSWFRQAPGK | hz58E05v32 |
| | QREPVATSHHGGTTNYAGSVKGRFTISRDNAKNTVYLQMNSL | |
| | RPEDTAVYYCKADHGYQGRGYWGQGTLVTVKP | |
| 73 | EVQLVESGGGEVQPGGSLRLSCAASGSTFSMYHMSWFRQAPG | hz58E05v36 |
| | KQREPVATSHHGGTTNYAGSVKGRFTISRDNAKNTVYLQMNS | |
| | LRPEDTAVYYCKADHGYGGRGYWGQGTLVTVKP | |
| 74 | EVQLVESGGGEVQPGGSLRLSCAASGSTFSMYHMSWFRQAPG | hz58E05v37 |
| | KQREPVATSHHGGTTNYAGSVKGRFTISRDNAKNTVYLQMNS | |
| | LRPEDTAVYYCKADHGYSGRGYWGQGTLVTVKP | |
| 75 | EVQLVESGGGEVQPGGSLRLSCAASGSTFSMYHMSWFRQAPG | hz58E05v38 |
| | KQREPVATSHHGGTTNYAGSVKGRFTISRDNAKNTVYLQMNS | |
| | LRPEDTAVYYCKADHGYVGRGYWGQGTLVTVKP | |
| 76 | EVQLVESGGGEVQPGGSLRLSCAASGSTFSMYHMSWFRQAPG | hz58E05v39 |
| | KQREPVATSHHGGTTNYAGSVKGRFTISRDNAKNTVYLQMNS | |
| | LRPEDTAVYYCKADHGYEGRGYWGQGTLVTVKP | |
| 77 | EVQLVESGGGEVQPGGSLRLSCAASGSTFSMYHMSWFRQAPG | hz58E05v40 |
| | KQREPVATSHHGGTTNYAGSVKGRFTISRDNAKNTVYLQMNS | |
| | LRPEDTAVYYCKADHGYNPRGYWGQGTLVTVKP | |
| 78 | EVQLVESGGGEVQPGGSLRLSCAASGSTFSMYHMSWFRQAPG | hz58E05v41 |
| | KQREPVATSHHGGTTNYAGSVKGRFTISRDNAKNTVYLQMNS | |
| | LRPEDTAVYYCKADHGYGNRGYWGQGTLVTVKP | |
| 79 | EVQLVESGGGEVQPGGSLRLSCAASGSTFSMYHMSWFRQAPG | hz58E05v42 |
| | KQREPVATSHHGGTTNYAGSVKGRFTISRDNAKNTVYLQMNS | |
| | LRPEDTAVYYCKADHGNYGRGYWGQGTLVTVKP | |
| 80 | EVQLVESGGGEVQPGGSLRLSCAASGSTFSMYHMSWFRQAPG | hz58E05v43 |
| | KQREPVATSHHGGTTNYAGSVKGRFTISRDNAKNTVYLQMNS | |
| | LRPEDTAVYYCKADHGYNRGGYWGQGTLVTVKP | |
| 81 | EVQLVESGGGEVQPGGSLRLSCAASGSTFSSYHMSWFRQAPGK | hz58E05v44 |
| | QREPVATSHHGGTTNYAGSVKGRFTISRDNAKNTVYLQMNSL | |
| | RPEDTAVYYCKADHGYGGRGYWGQGTLVTVKP | |
| 82 | EVQLVESGGGEVQPGGSLRLSCAASGSTFSSYHMSWFRQAPGK | hz58E05v45 |
| | QREPVATSHHGGTTNYAGSVKGRFTISRDNAKNTVYLQMNSL | |
| | RPEDTAVYYCKADHGYEGRGYWGQGTLVTVKP | |
| 83 | EVQLVESGGGEVQPGGSLRLSCAASGSTFSSYHMSWFRQAPGK | hz58E05v46 |
| | QREPVATSHHGGTTNYAGSVKGRFTISRDNAKNTVYLQMNSL | |
| | RPEDTAVYYCKADHGNYGRGYWGQGTLVTVKP | |
| 84 | EVQLVESGGGEVQPGGSLRLSCAASGSTFSIYHMSWFRQAPGK | hz58E05v47 |
| | QREPVATSHHGGTTNYAGSVKGRFTISRDNAKNTVYLQMNSL | |
| | RPEDTAVYYCKADHGYGGRGYWGQGTLVTVKP | |
| 85 | EVQLVESGGGEVQPGGSLRLSCAASGFTFSSYHMSWFRQAPGK | hz58E05v48 |
| | QREPVATSHHGGTTNYAGSVKGRFTISRDNAKNTVYLQMNTL | |
| | RAEDTAVYYCKADHGYQGRGYWGQGTLVTVKP | |
| 86 | EVQLVESGGGEVQPGGSLRLSCAASGSTFSSYHMSWFRQAPGK | hz58E05v49 |
| | QRELVATSHHGGTTNYAGSVKGRFTISRDNAKNTVYLQMNTL | |
| | RAEDTAVYYCKADHGYQGRGYWGQGTLVTVKP | |
| 87 | EVQLVESGGGEVQPGGSLRLSCAASGSTFSSYHMSWFRQAPGK | hz58E05v50 |
| | QREWVATSHHGGTTNYAGSVKGRFTISRDNAKNTVYLQMNTL | |
| | RAEDTAVYYCKADHGYQGRGYWGQGTLVTVKP | |
| 88 | EVQLVESGGGEVQPGGSLRLSCAASGSTFSSYHMSWFRQAPGK | hz58E05v51 |
| | ERELVATSHHGGTTNYAGSVKGRFTISRDNAKNTVYLQMNTL | |
| | RAEDTAVYYCKADHGYQGRGYWGQGTLVTVKP | |
| 89 | EVQLVESGGGEVQPGGSLRLSCAASGSTFSSYHMSWFRQAPGK | hz58E05v52 |
| | EREFVATSHHGGTTNYAGSVKGRFTISRDNAKNTVYLQMNTL | |
| | RAEDTAVYYCKADHGYQGRGYWGQGTLVTVKP | |
| 90 | EVQLVESGGGEVQPGGSLRLSCAPSGSTFSSYHMSWFRQAPGK | hz58E05v53 |
| | QREPVATSHHGGTTNYAGSVKGRFTISRDNAKNTVYLQMNTL | |
| | RAEDTAVYYCKADHGYQGRGYWGQGTLVTVKP | |
| 91 | EVQLVESGGGEVQPGGSLRLSCGPSGSTFSSYHMSWFRQAPGK | hz58E05v54 |
| | QREPVATSHHGGTTNYAGSVKGRFTISRDNAKNTVYLQMNTL | |
| | RAEDTAVYYCKADHGYQGRGYWGQGTLVTVKP | |
| 92 | QVQLVQSGGGLVQAGGSLRLSCAASGLTFDEHHMGWFRQAP | 1A10 |
| | GKEREFVAAITWHTGTTWYADSVKGRFTISRDDAKNTVALQM | |
| | NALKTDDTALYYCVDGRRPFFIREVGVEPDYWGQGTQVTVKP | |
| 93 | QVQLQESGGGWVQPGGSLRLSCAASGSSFGSNVMMWVRQAP | 1E4 |
| | GKGPEWVSTINSSGTGTFYADSVKGRFTISRNNAKNTLYLQMN | |
| | SLKPDDTAVYYCATSGPVRGWGPRSQGTQVTVKP | |
| 94 | QVQLVQSGGGLVQPGGSLRLSCAASGFTFASTGMSWVRQAPG | D9 |
| | KGPEWVSSINSGSDSTMYADSVKGRFTISRDNAMNMLFLQMN | |
| | SLKPEDTAVYYCAKWALSCSGYGCDDLPQDAGQGTQVTVKP | |
| 95 | QVQLVQSGGGLVQPGGSLRLSCAASGFTFASYGMSWVRQAPG | A3 |
| | KGPEWVSSINSGSDTSMYADSVKGRFTISRDSAKNMLFLQMNS | |
| | LKPEDTGVYYCAKWALSCSQYGCDDLPRPAGQGTQVTVKP | |
| 96 | QVQLQQSGGGEAQPGGSLRLSCAASGRTFSSYAMSWYRQAPG | E9 |
| | KGREWVATITSSGSTTYYAESVKGRFTISRDNAKNTVYLQMSS | |
| | LRAEDTAVYYCNKYTSRTVRDYWGQGTQVTVKP | |
| 97 | EVQLVQSGGGEVQPGGSLRLSCAASGRTFSSYAMSWYRQAPG | B4 |
| | KGREWVATITTGGGTTYYAESVKGRFTISRDNAKNTVYLQMS | |
| | SLRAEDTAVYYCNKYTSRFPRDYWGQGTQVTVKP | |
| 98 | QVQLVQDGDSLRLSCKASGGTFSSYAMGWFRQAPGQEREFVA | 57B06 |
| | AISSEGGSTYYADNMEGRFTTSRDNAKNTVYLQMNSLKPEDT | |
| | AVYYCAVKGVGWPQEQASYDYWGQGTQVTVKP | |
| 99 | QVQLQQSGGGLVQPGGSMRLSCAASGSIPSIDHMGWYRQAPG | 57B10 |
| | KERELVASIDLNGRTNYAGPVKGRFAISRDSAKNTMYLQMNSL | |
| | LPEDTAVYYCNHRWGSPDYYHDDVDYWGQGTQVTVKP | |
| 100 | QVQLVQSGGGLVQAGGSLRLSCAASGRSFSTYAMGWFRQAPG | 58B06 |
| | KELEFVAAVGWRGTNTYYQDSVKGRFTISRDNAKNTVYLQMS | |
| | SLKPEDTAVYYCAMGEPIRVGEKSGYDYWGQGTQVTVKP | |
| 101 | QVQLQQSGGGLVQAGDSLRLSCEASGGTFSSYAMGWFRQAPR | 57A12 |
| | QEREFVAAISSEGGSTYYADNLEGRFTTSRDNAKNTVYLQMNS | |
| | LKPEDTAVYYCAVKGVGWPQEQASYDYWGQGTQVTVKP | |
| 102 | QVQLVQSGGGLVQAGGSLRLSCAASGLTFSSYAMGWFRHPPG | 57B08 |
| | KEREFVAAISWSGGNTLYADSVKGRFTISRDNSKNTVYLQMNS | |
| | LKPEDTAVYSCAVGPRDYFSDLEVDFGSWGQGTQVTVKP | |
| 103 | QVQLVQSGGGLVQAGDSLRLSCAASGRTFSSLAVGWFRQAPW | 58A08 |
| | KEREFVGAISWSGGNTYYVDAVEGRITISRDNAENTVYLQMN | |
| | DLKPEDTAVYYCAAGLPIRVGVPGGYDYWGQGTQVTVKP | |
| 104 | QVQLQQSGGGLVQAGGSLRLSCAASGHTFSTYAMGWFRQAP | 57D1 |
| | GKEREFVAGITRSGDSTHYEDSVKGRFTISRDNTKNTVYLRMN | |
| | SLKPEDTAVYYCAAASFAYLSTYTHHYDYWGQGTQVTVKP | |
| 105 | QVQLQQSGGGLVQAGGSLRLSCAASGRSFGDYTVGWFRQAPG | 1H5 |
| | KERDFVAGLSWLGGTIYYADSVKGRFTISRDNAKNTVYLQMT | |
| | TLKPEDTAVYYCAASRSAISRKATDFGSWGQGTQVTVKP | |
| 106 | EVQLVESGGGEVQPGGSLRLSCAASGRSFGDYTVGWFRQAPG | hz1H5v1 |
| | KERDFVAGLSWLGGTIYYAESVKGRFTISRDNAKNTLYLQMSS | |
| | LRAEDTAVYYCAASRSAISRKATDFGSWGQGTLVTVKP | |
| 107 | EVQLVESGGGEVQPGGSLRLSCAASGRSFGDYTVGWFRQAPG | hz1H5v2 |
| | KERDFVAGLSWLGGTIYYAESVKGRFTISRDNAKNTVYLQMSS | |
| | LRAEDTAVYYCAASRSAISRKATDFGSWGQGTLVTVKP | |
| 108 | EVQLVESGGGEVQPGGSLRLSCAASGRSFGDYTVGWFRQAPG | hz1H5v3 |
| | KERDFVAGLSWLGGTIYYAESVKGRFTISRDNAKNTVYLQMT | |
| | TLKPEDTAVYYCAASRSAISRKATDFGSWGQGTLVTVKP | |
| 109 | EVQLVESGGGEVQPGGSLRLSCAASGRSFGDYTVGWFRQAPG | hz1H5v4 |
| | KERDFVAGLSWLGGTIYYAESVKGRFTISRDNAKNTVYLQMSS | |
| | LRAEDTAVYYCAASRSAISRKATDFGSWGQGTQVTVKP | |
| 110 | QVQLVQSGGGLVQDGDSLRLSCKASGGTFSSYAMGWFRQAPG | L57B06 |
| | QEREFVAAISSEGGSTYYADNMEGRFTTSRDNAKNTVYLQMN | |
| | SLKPEDTAVYYCAVKGVGWPQEQASYDYWGQGTQVTVKP | |
| ill | EVQLVESGGGEVQPGGSLRLSCAASGGTFSSYAMGWFRQAPG | h57B06v5 |
| | KEREFVAAISSEGGSTYYADNMEGRFTISRDNAKNTVYLQMSS | |
| | LRAEDTAVYYCAVKGVGWPQEQASYDYWGQGTLVTVKPG | |
| 112 | EVQLVESGGGEVQPGGSLRLSCAASGGTFSSYAMGWFRQAPG | h57B06v6 |
| | KEREFVAAISSEGGSTYYAESMEGRFTISRDNAKNTVYLQMSS | |
| | LRAEDTAVYYCAVKGVGWPQEQASYDYWGQGTLVTVKPG | |
| 113 | QVQLVQDGDSLRLSCAASGGTFSSYAMGWFRQAPGKEREFVA | h57B06v7 |
| | AISSEGGSTYYADNMEGRFTISRDNAKNTVYLQMSSLRAEDTA | |
| | VYYCAVKGVGWPQEQASYDYWGQGTLVTVKPG | |
| 114 | EVQLVESGGGEVQPGGSLRLSCAASGGTFSSYAMGWFRQAPG | h57B06v8 |
| | QEREFVAAISSEGGSTYYAESVKGRFTISRDNAKNTVYLQMSSL | |
| | RAEDTAVYYCAVKGVGWPQEQASYDYWGQGTLVTVKPG | |
| 115 | GFSFGSNVMM | CDR-H1 (L1A5, |
| | | hz1A5v1, 2, 3, 7, 8, 9, |
| | | 12, 17, 24, 25, 28, 29, |
| | | 30, 31, 32, 33, 34, 38, |
| | | 41, 42, 43, 44) |
| 116 | GFSFGSYVMM | CDR-H1 |
| | | (hz1A5v35, 45, 48) |
| 117 | GFSFGSFVMM | CDR-H1 |
| | | (hz1A5v36) |
| 118 | GFTFGSNVMM | CDR-H1 |
| | | (hz1A5v37, 46) |
| 119 | GFSFSSNVMM | CDR-H1 |
| | | (hz1A5v39, 47) |
| 120 | GFSFTSNVMM | CDR-H1 |
| | | (hz1A5v40) |
| 121 | GFTFSSNVMM | CDR-H1 |
| | | (hz1A5v49) |
| 122 | GFTFSSYVMM | CDR-H1 |
| | | (hz1A5v50) |
| 123 | ERTFSTYTMG | CDR-H1 (L57B04, |
| | | hz57B04v3, 4, 8, 9, 1 |
| | | 5, 20, 23, 24) |
| 124 | GSTFSMYHMS | CDR-H1 (L58E05, |
| | | hz58E05v1, 2, 3, 4, 5 |
| | | , 6, 7, 8, 9, 10, 11, 13, 1 |
| | | 9, 25, 26, 28, 29, 30, 3 |
| | | 1, 36, 37, 38, 39, 40, 4 |
| | | 1, 42, 43) |
| 125 | GSTFSLYHMS | CDR-H1 |
| | | (hz58E05v16) |
| 126 | GSTFSSYHMS | CDR-H1 |
| | | (hz58E05v18, 27, 3 |
| | | 2, 44, 45, 46, 49, 50, 5 |
| | | 1, 52, 53, 54) |
| 127 | GSTFSTYHMS | CDR-H1 |
| | | (hz58E05v20) |
| 128 | GSTFSKYHMS | CDR-H1 |
| | | (hz58E05v21) |
| 129 | GSTFSFYHMS | CDR-H1 |
| | | (hz58E05v22) |
| 130 | GSTFSDYHMS | CDR-H1 |
| | | (hz58E05v23) |
| 131 | GSTFSRYHMS | CDR-H1 |
| | | (hz58E05v24) |
| 132 | GSTFSIYHMS | CDR-H1 |
| | | (hz58E05v47) |
| 133 | GFTFSSYHMS | CDR-H1 |
| | | (hz58E05v48) |
| 134 | GLTFDEHHMG | CDR-H1 (cx3969 |
| | | pP12-B7H3-1359- |
| | | 1A10 xELL) |
| 135 | GSSFGSNVMM | CDR-H1 (cx3982 |
| | | pP12-B7H3-1675- |
| | | 1E4 xELL) |
| 136 | GFTFASTGMS | CDR-H1 (cx3218 |
| | | pP12-B7H3 avi- |
| | | D9-xELL) |
| 137 | GFTFASYGMS | CDR-H1 (cx3219 |
| | | pP12-B7H3 avi- |
| | | A3-xELL) |
| 138 | GRTFSSYAMS | CDR-H1 |
| | | (synthetic E9, |
| | | synthetic B4) |
| 139 | GGTFSSYAMG | CDR-H1 (pPL2- |
| | | B7H3 VHH-9 |
| | | (57B06) IgG1, |
| | | pPL2-B7H3 VHH- |
| | | 7 (57A12) IgG1, |
| | | L57B06, |
| | | h57B06v5, 6, 7, 8) |
| 140 | GSIPSIDHMG | CDR-H1 (pPL2- |
| | | B7H3 VHH-12 |
| | | (57B10)IgG1) |
| 141 | GRSFSTYAMG | CDR-H1 (pPL2- |
| | | B7H3 VHH-54 |
| | | (58B06) IgG1) |
| 142 | GLTFSSYAMG | CDR-H1 (pPL2- |
| | | B7H3 VHH-10 |
| | | (57B08) IgG1) |
| 143 | GRTFSSLAVG | CDR-H1 (pPL2- |
| | | B7H3 VHH-53 |
| | | (58A08) IgG1) |
| 144 | GHTFSTYAMG | CDR-H1 (pP12- |
| | | B7H3 VHH |
| | | 57D1c-IgG1) |
| 145 | GRSFGDYTVG | CDR-H1 (1H5, |
| | | hz1H5v1, 2, 3, 4) |
| 146 | TIYSSGTGTF | CDR-H2 |
| | | (hz1A5v1, 2, 3, 7, 8, 12, |
| | | 24, 25, 28, 29, 34, 35, |
| | | 36, 37, 38, 39, 40) |
| 147 | TIYSRGTGTF | CDR-H2 |
| | | (hz1A5v9, 17, 33, 41, |
| | | 42, 43, 45, 46, 47, |
| | | 49) |
| 148 | TIYSRGGSTF | CDR-H2 |
| | | (hz1A5v30) |
| 149 | TIYSSGTGTY | CDR-H2 |
| | | (hz1A5v31) |
| 150 | TIYSRGGSTY | CDR-H2 |
| | | (hz1A5v32) |
| 151 | TIYSRGTGTY | CDR-H2 |
| | | (hz1A5v44, 48, 50) |
| 152 | VVNWSGGSKY | CDR-H2 (L57B04, |
| | | hz57B04v3, 4, 8, 9, 2 |
| | | 3) |
| 153 | VVNWGGGSKY | CDR-H2 |
| | | (hz57B04v15, 20, 2 |
| | | 4) |
| 154 | TSHHGGTTN | CDR-H2 (L58E05, |
| | | hz58E05v1, 2, 3, 4, 5, |
| | | 6, 7, 8, 9, 10, 11, 13, |
| | | 16, 18, 19, 20, 21, 22, |
| | | 23, 2, 2, 26, 27, 28, 29, |
| | | 30, 31, 32, 36, 37, 38, |
| | | 39, 40, 41, 42, 43, 44, |
| | | 45, 46, 47, 48, 49, 50, |
| | | 51, 52, 53, 54) |
| 155 | AITWHTGTTW | CDR-H2 (cx3969 |
| | | pP12-B7H3-1359- |
| | | 1A10 xELL) |
| 156 | TINSSGTGTF | CDR-H2 (cx3982 |
| | | pP12-B7H3-1675- |
| | | 1E4 xELL) |
| 157 | SINSGSDSTM | CDR-H2 (cx3218 |
| | | pP12-B7H3 avi- |
| | | D9-xELL) |
| 158 | SINSGSDTSM | CDR-H2 |
| | | (GFTFASYGMS) |
| 159 | TITSSGSTTY | CDR-H2 |
| | | (synthetic E9) |
| 160 | TITTGGGTTY | CDR-H2 |
| | | (synthetic B4) |
| 161 | AISSEGGSTY | CDR-H2 (pPL2- |
| | | B7H3 VHH-9 |
| | | (57B06) IgG1, |
| | | pPL2-B7H3 VHH- |
| | | 7 (57A12) IgG1, |
| | | L57B06, |
| | | h57B06v5, 6, 7, 8) |
| 162 | SIDLNGRTN | CDR-H2 (pPL2- |
| | | B7H3 VHH-12 |
| | | (57B10)IgG1) |
| 163 | AVGWRGTNTY | CDR-H2 (pPL2- |
| | | B7H3 VHH-54 |
| | | (58B06) IgG1) |
| 164 | AISWSGGNTL | CDR-H2 (pPL2- |
| | | B7H3 VHH-10 |
| | | (57B08) IgG1) |
| 165 | AISWSGGNTY | CDR-H2 (pPL2- |
| | | B7H3 VHH-53 |
| | | (58A08) IgG1) |
| 166 | GITRSGDSTH | CDR-H2 (pP12- |
| | | B7H3 VHH |
| | | 57D1c-IgG1) |
| 167 | GLSWLGGTIY | CDR-H2 (1H5, |
| | | hz1H5v1, 2, 3, 4) |
| 168 | SGPVRGWGP | CDR-H3 (L1A5, |
| | | hz1A5v1, 2, 3, 7, 8, 9, |
| | | 12, 17, 24, 25, 28, 29, |
| | | 30, 31, 32, 33, 34, 35, |
| | | 36, 37, 39, 40, 41, 42, |
| | | 43, 44, 45, 46, 47, 48, |
| | | 49, 50, cx3982 |
| | | pP12-B7H3-1675- |
| | | 1E4 xELL) |
| 169 | SGPVRGWGY | CDR-H3 |
| | | (hz1A5v38) |
| 170 | GGAYSGPYYDTRQYTY | CDR-H3 (L57B04, |
| | | hz57B04v3, 4, 8, 9, |
| | | 15, 23, 24) |
| 171 | GGAYSTPYYDTRQYTY | CDR-H3 |
| | | (hz57B04v20) |
| 172 | DHGYNGRGY | CDR-H3 (L58E05, |
| | | hz58E05v1, 2, 3, 4, |
| | | 8, 28, 29, 30) |
| 173 | DHGYQGRGY | CDR-H3 |
| | | (hz58E05v5, 9, 13, 16, |
| | | 18, 19, 20, 21, 22, |
| | | 23, 24, 25, 26, 27, 31, |
| | | 32, 48, 49, 50, 51, 52, |
| | | 53, 54) |
| 174 | DHGYNARGY | CDR-H3 |
| | | (hz58E05v6) |
| 175 | DHGYNTRGY | CDR-H3 |
| | | (hz58E05v7, 11) |
| 176 | DHGYGGRGY | CDR-H3 |
| | | (hz58E05v36, 44, |
| | | 47) |
| 177 | DHGYSGRGY | CDR-H3 |
| | | (hz58E05v37) |
| 178 | DHGYVGRGY | CDR-H3 |
| | | (hz58E05v38) |
| 179 | DHGYEGRGY | CDR-H3 |
| | | (hz58E05v39, 45) |
| 180 | DHGYNPRGY | CDR-H3 |
| | | (hz58E05v40) |
| 181 | DHGYGNRGY | CDR-H3 |
| | | (hz58E05v41) |
| 182 | DHGNYGRGY | CDR-H3 |
| | | (hz58E05v42, 46) |
| 183 | DHGYNRGGY | CDR-H3 |
| | | (hz58E05v43) |
| 184 | GRRPFFIREVGVEPDY | CDR-H3 (cx3969 |
| | | pP12-B7H3-1359- |
| | | 1A10 xELL) |
| 185 | WALSCSGYGCDDLPQD | CDR-H3 (cx3218 |
| | | pP12-B7H3 avi- |
| | | D9-xELL) |
| 186 | WALSCSQYGCDDLPRP | CDR-H3 (cx3219 |
| | | pP12-B7H3 avi- |
| | | A3-xELL) |
| 187 | YTSRTVRDY | CDR-H3 |
| | | (synthetic E9) |
| 188 | YTSRFPRDY | CDR-H3 |
| | | (synthetic B4) |
| 189 | KGVGWPQEQASYDY | CDR-H3 (pPL2- |
| | | B7H3 VHH-7 |
| | | (57A12) IgG1) |
| 190 | MLRRRGSPGMGVHVGAALGALWFCLTGALEVQVPEDPVVAL | B7H3 |
| | VGTDATLCCSFSPEPGFSLAQLNLIWQLTDTKQLVHSFAEGQD | |
| | QGSAYANRTALFPDLLAQGNASLRLQRVRVADEGSFTCFVSIR | |
| | DFGSAAVSLQVAAPYSKPSMTLEPNKDLRPGDTVTITCSSYQG | |
| | YPEAEVFWQDGQGVPLTGNVTTSQMANEQGLFDVHSILRVVL | |
| | GANGTYSCLVRNPVLQQDAHSSVTITPQRSPTGAVEVQVPEDP | |
| | VVALVGTDATLRCSFSPEPGFSLAQLNLIWQLTDTKQLVHSFTE | |
| | GRDQGSAYANRTALFPDLLAQGNASLRLQRVRVADEGSFTCF | |
| | VSIRDFGSAAVSLQVAAPYSKPSMTLEPNKDLRPGDTVTITCSS | |
| | YRGYPEAEVFWQDGQGVPLTGNVTTSQMANEQGLFDVHSVL | |
| | RVVLGANGTYSCLVRNPVLQQDAHGSVTITGQPMTFPPEALW | |
| | VTVGLSVCLIALLVALAFVCWRKIKQSCEEENAGAEDQDGEGE | |
| | GSKTALQPLKHSDSKEDDGQEIA | |
| 191 | GGSGGS | (GGS)2 linker |
| 192 | GGSGGSGGS | (GGS)3 linker |
| 193 | GGSGGSGGSGGS | (GGS)4 linker |
| 194 | GGSGGSGGSGGSGGS | (GGS)5 linker |
| 195 | GGGG | glycine linker |
| 196 | GGGGG | glycine linker |
| 197 | GGGGGG | glycine linker |
| 198 | PAPELLGGPS VFLFPPKPKD TLMISRTPEV TCVVVDVSHE | human IgG1 Fc |
| | DPEVKFNWYV DGVEVHNAKT KPREEQYNST YRVVSVLTVL | |
| | HQDWLNGKEY KCKVSNKALP APIEKTISKA KGQPREPQVY | |
| | TLPPSRDELT KNQVSLTCLV KGFYPSDIAV EWESNGQPEN | |
| | NYKTTPPVLD SDGSFFLYSK LTVDKSRWQQ GNVFSCSVMH | |
| | EALHNHYTQK SLSLSPGK | |
| 199 | PAPGGPSVFL FPPKPKDTLM ISRTPEVTCV VVDVSHEDPE | Fc xELL |
| | VKFNWYVDGV EVHNAKTKPR EEQYNSTYRV VSVLTVLHQD | |
| | WLNGKEYKCK VSNKALPAPI EKTISKAKGQ PREPQVYTLP | |
| | PSRDELTKNQ VSLTCLVKGF YPSDIAVEWE SNGQPENNYK | |
| | TTPPVLDSDG SFFLYSKLTV DKSRWQQGNV FSCSVMHEAL | |
| | HNHYTQKSLS LSPGK | |
| 200 | PAPPVAGPSV FLFPPKPKDT LMISRTPEVT CVVVDVSHED | human IgG2 Fc |
| | PEVQFNWYVD GVEVHNAKTK PREEQFNSTF RVVSVLTVVH | |
| | QDWLNGKEYK CKVSNKGLPA PIEKTISKTK GQPREPQVYT | |
| | LPPSREEMTK NQVSLTCLVK GFYPSDISVE WESNGQPENN | |
| | YKTTPPMLDS DGSFFLYSKL TVDKSRWQQG NVFSCSVMHE | |
| | ALHNHYTQKS LSLSPGK | |
| 201 | PAPELLGGPS VFLFPPKPKD TLMISRTPEV TCVVVDVSHE | human IgG3 Fc |
| | DPEVQFKWYV DGVEVHNAKT KPREEQYNST FRVVSVLTVL | |
| | HQDWLNGKEY KCKVSNKALP APIEKTISKT KGQPREPQVY | |
| | TLPPSREEMT KNQVSLTCLV KGFYPSDIAV EWESSGQPEN | |
| | NYNTTPPMLD SDGSFFLYSK LTVDKSRWQQ GNIFSCSVMH | |
| | EALHNRFTQK SLSLSPGK | |
| 202 | PAPEFLGGPS VFLFPPKPKD TLMISRTPEV TCVVVDVSQE | human IgG4 Fc |
| | DPEVQFNWYV DGVEVHNAKT KPREEQFNST YRVVSVLTVL | |
| | HQDWLNGKEY KCKVSNKGLP SSIEKTISKA KGQPREPQVY | |
| | TLPPSQEEMT KNQVSLTCLV KGFYPSDIAV EWESNGQPEN | |
| | NYKTTPPVLD SDGSFFLYSR LTVDKSRWQE GNVFSCSVMH | |
| | EALHNHYTQK SLSLSLGK | |
| 203 | PAPELLGGPS VFLFPPKPKD TLMISRTPEV TCVVVDVSQE | human IgG4 Fc |
| | DPEVQFNWYV DGVEVHNAKT KPREEQFNST YRVVSVLTVL | |
| | HQDWLNGKEY KCKVSNKGLP SSIEKTISKA KGQPREPQVY | |
| | TLPPSQEEMT KNQVSLTCLV KGFYPSDIAV EWESNGQPEN | |
| | NYKTTPPVLD SDGSFFLYSR LTVDKSRWQE GNVFSCSVMH | |
| | EALHNHYTQK SLSLSLGK | |
| 204 | EPKSSDKTHTCPPC | modified IgG1 |
| | | hinge |
| 205 | DKTHTCPPC | truncated IgG1 |
| | | hinge |
| 206 | ESKYGPPCPPC | modified IgG4 |
| | | hinge |
| 207 | GQGTLVTVKPGG | carboxy-terminal |
| | | sequence |
| 208 | GQGTLVTVEPGG | carboxy-terminal |
| | | sequence |
| 209 | QVQLVQSGGGVVQPGRSLRLSCKASGYTFTRYTMHWVRQAP | OKT3 VH |
| | GKGLEWIGYINPSRGYTNYNQKVKDRFTISRDNSKNTAFLQMD | |
| | SLRPEDTGVYFCARYYDDHYCLDYWGQGTPVTVSS | |
| 210 | DIQMTQSPSSLSASVGDRVTITCSASSSVSYMNWYQQTPGKAP | OKT3 VL |
| | KRWIYDTSKLASGVPSRFSGSGSGTDYTFTISSLQPEDIATYYCQ | |
| | QWSSNPFTFGQGTKLQIT | |
| 211 | QVQLVQSGGGVVQPGRSLRLSCKASGYTFTRYTMHWVRQAP | OKT3 humanized |
| | GKGLEWIGYINPSRGYTNYNQKVKDRFTISRDNSKNTAFLQMD | VH |
| | SLRPEDTGVYFCARYYDDHYSLDYWGQGTPVTVSS | |
| 212 | DVQLVQSGAEVKKPGASVKVSCKASGYTFTRYTMHWVRQAP | OKT3 humanized |
| | GQGLEWIGYINPSRGYTNYADSVKGRFTITTDKSTSTAYMELSS | VH |
| | LRSEDTATYYCARYYDDHYCLDYWGQGTTVTVSS | |
| 213 | QVQLVQSGAELKKPGASVKVSCKASGYTFTRYTMHWVRQAP | OKT3 humanized |
| | GQCLEWMGYINPSRGYTNYNQKFKDKATLTADKSTSTAYMEL | VH |
| | RSLRSDDTAVYYCARYYDDHYSLDYWG QGTLVTVSS | |
| 214 | QIVLTQSPAIMSASPGEKVTMTCSASSSVSYMNWYQQKSGTSP | OKT3 humanized |
| | KRWIYDTSKLASGVPAHFRGSGSGTSYSLTISGMEAEDAATYY | VL |
| | CQQWSSNPFTFGSGTKLEIN | |
| 215 | DIQMTQSPSSLSASVGDRVTITCRASQSVSYMNWYQQKPGKAP | OKT3 humanized |
| | KRWIYDTSKVASGVPARFSGSGSGTDYSLTINSLEAEDAATYY | VL |
| | CQQWSSNPLTFGGGTKVEIK | |
| 216 | DIQLTQSPSILSASVGDRVTITCRASSSVSYMNWYQQKPGKAPK | OKT3 humanized |
| | RWIYDT | VL |
| | SKVASGVPYRFSGSGSGTEYTLTISSMQPEDFATYYCQQWSSN | |
| | PLTFGCGTKVEIKRT | |
| 217 | EVQLVESGGGLVQPKGSLKLSCAASGFTFNTYAMNWVRQAPG | anti-CD3 Hv |
| | KGLEWVARIRSKYNNYATYYADSVKDRFTISRDDSQSILYLQM | |
| | NNLKTEDTAMYYCVRHGNFGNSYVSWFAYWGQGTLVTVSA | |
| 218 | QAVVTQESALTTSPGETVTLTCRSSTGAVTTSNYANWVQEKPD | anti-CD3 Lv |
| | HLFTGLIGGTNKRAPGVPARFSGSLIGDKAALTITGAQTEDEAI | |
| | YFCALWYSNLWVFGGGTKLTVL | |
| 219 | TYAMN | anti-CD3 VH |
| | | CDR1 |
| 220 | RIRSKYNNYATYYADSVKD | anti-CD3 VH |
| | | CDR2 |
| 221 | HGNFGNSYVSWFAY | anti-CD3 VH |
| | | CDR3 |
| 222 | RSSTGAVTTSNYAN | anti-CD3 VL |
| | | CDR1 |
| 223 | GTNKRAP | anti-CD3 VL |
| | | CDR2 |
| 224 | ALWYSNLWV | anti-CD3 VL |
| | | CDR3 |
| 225 | EVQLVESGGGLVQPGGSLRLSCAASGFTFSTYAMNWVRQAPG | anti-CD3 VH1 |
| | KGLEWVGRIRSKYNNYATYYADSVKDRFTISRDDSKNSLYLQ | |
| | MNSLKTEDTAVYYCVRHGNFGNSYVSWFAYWGQGTLVTVSS | |
| 226 | EVKLVESGGGLVQPGGSLRLSCAASGFTFNTYAMNWVRQAPG | anti-CD3 VH2 |
| | KGLEWVARIRSKYNNYATYYADSVKDRFTISRDDSKSSLYLQ | |
| | MNNLKTEDTAMYYCVRHGNFGNSYVSWFAYWGQGTLVTVSS | |
| 227 | EVKLVESGGGLVKPGRSLRLSCAASGFTFNTYAMNWVRQAPG | anti-CD3 VH3 |
| | KGLEWVARIRSKYNNYATYYADSVKDRFTISRDDSKSILYLQM | |
| | NNLKTEDTAMYYCVRHGNFGNSYVSWFAYWGQGTLVTVSS | |
| 228 | EVKLVESGGGLVKPGRSLRLSCAASGFTFNTYAMNWVRQAPG | anti-CD3 VH4 |
| | KGLEWVARIRSKYNNYATYYADSVKDRFTISRDDSKSILYLQM | |
| | NSLKTEDTAMYYCVRHGNFGNSYVSWFAYWGQGTLVTVSS | |
| 229 | EVKLVESGGGLVKPGRSLRLSCAASGFTFNTYAMNWVRQAPG | anti-CD3 VH5 |
| | KGLEWVARIRSKYNNYATYYADSVKDRFTISRDDSKSILYLQM | |
| | NSLKTEDTAMYYCVRHGNFGNSYVSWFAYWGQGTLVTVSS | |
| 230 | EVQLLESGGGLVQPGGSLRLSCAASGFTFSTYAMNWVRQAPG | anti-CD3 VH6 |
| | KGLEWVSRIRSKYNNYATYYADSVKGRFTISRDDSKNTLYLQ | |
| | MNSLRAEDTAVYYCVRHGNFGNSYVSWFAYWGQGTLVTVSS | |
| 231 | EVQLVESGGGLVQPGGSLRLSCAASGFTFSTYAMSWVRQAPG | anti-CD3 VH7 |
| | KGLEWVGRIRSKYNNYATYYADSVKGRFTISRDDSKNTLYLQ | |
| | MNSLRAEDTAVYYCVRHGNFGDSYVSWFAYWGQGTLVTVSS | |
| 232 | EVQLVESGGGLVQPGGSLKLSCAASGFTFNKYAMNWVRQAPG | anti-CD3 VH8 |
| | KGLEWVARIRSKYNNYATYYADSVKDRFTISRDDSKNTAYLQ | |
| | MNNLKTEDTAVYYCVRHGNFGNSYISYWAYWGQGTLVTVS | |
| 233 | EVQLVESGGGLVQPGGSLRLSCAASGFTFNTYAMNWVRQAPG | anti-CD3 VH9 |
| | KGLEWVARIRSKYNNYATYYADSVKGRFTISRDDSKNTLYLQ | |
| | MNSLRAEDTAVYYCVRHGNFGNSYVSWFAYWGQGTTVTVSS | |
| 234 | EVQLVESGGGLVQPGGSLRLSCAASGFTFNTYAMNWVRQAPG | anti-CD3 VH10 |
| | KGLEWVARIRSKYNNYATYYADSVKGRFTISRDDSKNTLYLQ | |
| | MNSLRAEDTAVYYCVRHGNFGNSYVSYFAYWGQGTTVTVSS | |
| 235 | EVQLVESGGGLVQPKGSLKLSCAASGFTFNTYAMNWVRQAPG | anti-CD3 VH11 |
| | KGLEWVARIRSKYNNYATYYADSVKDRFTISRDDSQSILYLQM | |
| | NNLKTEDTAMYYCVRHGNFGNSYVSWFAYWGQGTLVTVSS | |
| 236 | EVQLVESGGGLVQPGGSLRLSCAASGFTFNTYAMNWVRQAPG | anti-CD3 VH12 |
| | KGLEWVARIRSKYNNYATYYADSVKGRFTISRDDAKNTLYLQ | |
| | MSSLRAEDTAVYYCVRHGNFGNSYVSWFAYWGQGTLVTVKP | |
| 237 | EVQLVESGGGLVQPGGSLRLSCAASGFTFNTYAMNWVRQAPG | anti-CD3 VH13 |
| | KCLEWVARIRSKYNNYATYYADSVKGRFTISRDDAKNTLYLQ | |
| | MSSLRAEDTAVYYCVRHGNFGNSYVSWFAYWGQGTLVTVKP | |
| 238 | EVQLVESGGGLVQPGGSLRLSCAASGFTFNTYAMNWVRQAPG | anti-CD3 VH14 |
| | KGLEWVARIRSKYNNYATYYADSVKGRFTISRDDAKNTLYLQ | |
| | MSSLRAEDTAVYYCVRHGNFGNSYVSWFAYWGCGTLVTVKP | |
| 239 | EVQLVESGGGLVQPGGSLRLSCAASGFTFSTYAMNWVRQAPG | anti-CD3 VH15 |
| | KGLEWVARIRSKYNNYATYYADSVKGRFTISRDDAKNTLYLQ | |
| | MSSLRAEDTAVYYCVRHGNFGNSYVSWFAYWGQGTLVTVSS | |
| 240 | EVQLVESGGGLVQPGGSLRLSCAASGFTFNTYAMNWVRQAPG | anti-CD3 VH16 |
| | KGLEWVSRIRSKYNNYATYYADSVKGRFTISRDDAKNTLYLQ | |
| | MSSLRAEDTAVYYCVRHGNFGNSYVSWFAYWGQGTLVTVSS | |
| 241 | EVQLVESGGGLVQPGGSLRLSCAASGFTFSTYAMNWVRQAPG | anti-CD3 VH17 |
| | KGLEWVSRIRSKYNNYATYYADSVKGRFTISRDDAKNTLYLQ | |
| | MSSLRAEDTAVYYCVRHGNFGNSYVSWFAYWGQGTLVTVSS | |
| 242 | EVQLVESGGGLVQPGGSLRLSCAASGFTFSTYAMNWVRQAPG | anti-CD3 VH18 |
| | KCLEWVARIRSKYNNYATYYADSVKGRFTISRDDAKNTLYLQ | |
| | MSSLRAEDTAVYYCVRHGNFGNSYVSWFAYWGQGTLVTVSS | |
| 243 | EVQLVESGGGLVQPGGSLRLSCAASGFTFNTYAMNWVRQAPG | anti-CD3 VH19 |
| | KCLEWVSRIRSKYNNYATYYADSVKGRFTISRDDAKNTLYLQ | |
| | MSSLRAEDTAVYYCVRHGNFGNSYVSWFAYWGQGTLVTVSS | |
| 244 | EVQLVESGGGLVQPGGSLRLSCAASGFTFSTYAMNWVRQAPG | anti-CD3 VH20 |
| | KCLEWVSRIRSKYNNYATYYADSVKGRFTISRDDAKNTLYLQ | |
| | MSSLRAEDTAVYYCVRHGNFGNSYVSWFAYWGQGTLVTVSS | |
| 245 | EVQLVESGGGLVQPGGSLRLSCAASGFTFSTYAMNWVRQAPG | anti-CD3 VH21 |
| | KCLEWVGRIRSKYNNYATYYADSVKDRFTISRDDSKNSLYLQ | |
| | MNSLKTEDTAVYYCVRHGNFGNSYVSWFAYWGQGTLVTVSS | |
| 246 | EVKLVESGGGLVQPGGSLRLSCAASGFTFNTYAMNWVRQAPG | anti-CD3 VH22 |
| | KCLEWVARIRSKYNNYATYYADSVKDRFTISRDDSKSSLYLQ | |
| | MNNLKTEDTAMYYCVRHGNFGNSYVSWFAYWGQGTLVTVSS | |
| 247 | EVKLVESGGGLVKPGRSLRLSCAASGFTFNTYAMNWVRQAPG | anti-CD3 VH23 |
| | KCLEWVARIRSKYNNYATYYADSVKDRFTISRDDSKSILYLQM | |
| | NNLKTEDTAMYYCVRHGNFGNSYVSWFAYWGQGTLVTVSS | |
| 248 | EVKLVESGGGLVKPGRSLRLSCAASGFTFNTYAMNWVRQAPG | anti-CD3 VH24 |
| | KCLEWVARIRSKYNNYATYYADSVKDRFTISRDDSKSILYLQM | |
| | NSLKTEDTAMYYCVRHGNFGNSYVSWFAYWGQGTLVTVSS | |
| 249 | EVKLVESGGGLVKPGRSLRLSCAASGFTFNTYAMNWVRQAPG | anti-CD3 VH25 |
| | KCLEWVARIRSKYNNYATYYADSVKDRFTISRDDSKSILYLQM | |
| | NSLKTEDTAMYYCVRHGNFGNSYVSWFAYWGQGTLVTVSS | |
| 250 | EVQLLESGGGLVQPGGSLRLSCAASGFTFSTYAMNWVRQAPG | anti-CD3 VH26 |
| | KCLEWVSRIRSKYNNYATYYADSVKGRFTISRDDSKNTLYLQ | |
| | MNSLRAEDTAVYYCVRHGNFGNSYVSWFAYWGQGTLVTVSS | |
| 251 | EVQLVESGGGLVQPGGSLRLSCAASGFTFSTYAMSWVRQAPG | anti-CD3 VH27 |
| | KCLEWVGRIRSKYNNYATYYADSVKGRFTISRDDSKNTLYLQ | |
| | MNSLRAEDTAVYYCVRHGNFGDSYVSWFAYWGQGTLVTVSS | |
| 252 | EVQLVESGGGLVQPGGSLKLSCAASGFTFNKYAMNWVRQAPG | anti-CD3 VH28 |
| | KCLEWVARIRSKYNNYATYYADSVKDRFTISRDDSKNTAYLQ | |
| | MNNLKTEDTAVYYCVRHGNFGNSYISYWAYWGQGTLVTVS | |
| 253 | EVQLVESGGGLVQPGGSLRLSCAASGFTFNTYAMNWVRQAPG | anti-CD3 VH29 |
| | KCLEWVARIRSKYNNYATYYADSVKGRFTISRDDSKNTLYLQ | |
| | MNSLRAEDTAVYYCVRHGNFGNSYVSWFAYWGQGTTVTVSS | |
| 254 | EVQLVESGGGLVQPGGSLRLSCAASGFTFNTYAMNWVRQAPG | anti-CD3 VH30 |
| | KCLEWVARIRSKYNNYATYYADSVKGRFTISRDDSKNTLYLQ | |
| | MNSLRAEDTAVYYCVRHGNFGNSYVSYFAYWGQGTTVTVSS | |
| 255 | EVQLVESGGGLVQPKGSLKLSCAASGFTFNTYAMNWVRQAPG | anti-CD3 VH31 |
| | KCLEWVARIRSKYNNYATYYADSVKDRFTISRDDSQSILYLQM | |
| | NNLKTEDTAMYYCVRHGNFGNSYVSWFAYWGQGTLVTVSS | |
| 256 | QAVVTQESALTTSPGETVTLTCRSSTGAVTTSNYANWVQEKPD | anti-CD3 VL1 |
| | HLFTGLIGGTNKRAPGVPARFSGSLIGDKAALTITGAQTEDEAI | |
| | YFCALWYSNLWVFGGGTKLTVL | |
| 257 | QAVVTQEPSLTVSPGGTVTLTCGSSTGAVTTSNYANWVQQKP | anti-CD3 VL2 |
| | GKSPRGLIGGTNKRAPGVPARFSGSLLGGKAALTISGAQPEDEA | |
| | DYYCALWYSNHWVFGCGTKLEIK | |
| 258 | QAVVTQEPSLTVSPGGTVTLTCRSSTGAVTTSNYANWVQQKP | anti-CD3 VL3 |
| | GQAPRGLIGGTNKRAPWTPARFSGSLLGGKAALTITGAQAEDE | |
| | ADYYCALWYSNLWVFGGGTKLTVL | |
| 259 | QAVVTQEPSFSVSPGGTVTLTCRSSTGAVTTSNYANWVQQTPG | anti-CD3 VL4 |
| | QAFRGLIGGTNKRAPGVPARFSGSLIGDKAALTITGAQADDESI | |
| | YFCALWYSNLWVFGGGTKLTVL | |
| 260 | QAVVTQEPSFSVSPGGTVTLTCRSSTGAVTTSNYANWVQQTPG | anti-CD3 VL5 |
| | QAFRGLIGGTNKRAPGVPARFSGSILGNKAALTITGAQADDESI | |
| | YFCALWYSNLWVFGGGTKLTVL | |
| 261 | QAVVTQEPSFSVSPGGTVTLTCRSSTGAVTTSNYANWVQQTPG | anti-CD3 VL6 |
| | QAFRGLIGGTNKRAPGVPARFSGSILGNKAALTITGAQADDESD | |
| | YYCALWYSNLWVFGGGTKLTVL | |
| 262 | QAVVTQEPSLTVSPGGTVTLTCGSSTGAVTTSNYANWVQEKP | anti-CD3 VL7 |
| | GQAFRGLIGGTNKRAPGTPARFSGSLLGGKAALTLSGAQPEDE | |
| | AEYYCALWYSNLWVFGGGTKLTVL | |
| 263 | QTVVTQEPSLTVSPGGTVTLTCGSSTGAVTSGNYPNWVQQKPG | anti-CD3 VL8 |
| | QAPRGLIGGTKFLAPGTPARFSGSLLGGKAALTLSGVQPEDEAE | |
| | YYCVLWYSNRWVFGGGTKLTVL | |
| 264 | QAVVTQEPSLTVSPGGTVTLTCGSSTGAVTTSNYANWVQQKP | anti-CD3 VL9 |
| | GQAFRGLIGGTNKRAPGVPARFSGSLLGGKAALTISGAQPEDE | |
| | ADYYCALWYSNHWVFGGGTKLEIK | |
| 265 | QAVVTQEPSLTVSPGGTVTLTCGSSTGAVTTSNYANWVQQKP | anti-CD3 VL10 |
| | GQAFRGLIGGTNKRAPGVPARFSGSLLGGKAALTISGAQPEDE | |
| | ADYYCALWYSNHWVFGGGTKLEIK | |
| 266 | QAVVTQEPSLTVSPGGTVTLTCGSSTGAVTTSNYANWVQQKP | anti-CD3 VL11 |
| | GQCFRGLIGGTNKRAPGVPARFSGSLLGGKAALTISGAQPEDE | |
| | ADYYCALWYSNHWVFGEGTKLEIK | |
| 267 | QAVVTQESALTTSPGETVTLTCRSSTGAVTTSNYANWVQEKPD | anti-CD3 VL12 |
| | HLFTGLIGGTNKRAPGVPARFSGSLIGDKAALTITGAQTEDEAI | |
| | YFCALWYSNLWVFGCGTKLTVL | |
| 268 | QAVVTQEPSLTVSPGGTVTLTCGSSTGAVTTSNYANWVQQKP | anti-CD3 VL13 |
| | GKSPRGLIGGTNKRAPGVPARFSGSLLGGKAALTISGAQPEDEA | |
| | DYYCALWYSNHWVFGGGTKLEIK | |
| 269 | QAVVTQEPSLTVSPGGTVTLTCRSSTGAVTTSNYANWVQQKP | anti-CD3 VL14 |
| | GQAPRGLIGGTNKRAPWTPARFSGSLLGGKAALTITGAQAEDE | |
| | ADYYCALWYSNLWVFGCGTKLTVL | |
| 270 | QAVVTQEPSFSVSPGGTVTLTCRSSTGAVTTSNYANWVQQTPG | anti-CD3 VL15 |
| | QAFRGLIGGTNKRAPGVPARFSGSLIGDKAALTITGAQADDESI | |
| | YFCALWYSNLWVFGGGTKLTVL | |
| 271 | QAVVTQEPSFSVSPGGTVTLTCRSSTGAVTTSNYANWVQQTPG | anti-CD3 VL16 |
| | QAFRGLIGGTNKRAPGVPARFSGSILGNKAALTITGAQADDESI | |
| | YFCALWYSNLWVFGCGTKLTVL | |
| 272 | QAVVTQEPSFSVSPGGTVTLTCRSSTGAVTTSNYANWVQQTPG | anti-CD3 VL17 |
| | QAFRGLIGGTNKRAPGVPARFSGSILGNKAALTITGAQADDESD | |
| | YYCALWYSNLWVFGCGTKLTVL | |
| 273 | QAVVTQEPSLTVSPGGTVTLTCGSSTGAVTTSNYANWVQEKP | anti-CD3 VL18 |
| | GQAFRGLIGGTNKRAPGTPARFSGSLLGGKAALTLSGAQPEDE | |
| | AEYYCALWYSNLWVFGCGTKLTVL | |
| 274 | QTVVTQEPSLTVSPGGTVTLTCGSSTGAVTSGNYPNWVQQKPG | anti-CD3 VL19 |
| | QAPRGLIGGTKFLAPGTPARFSGSLLGGKAALTLSGVQPEDEAE | |
| | YYCVLWYSNRWVFGCGTKLTVL | |
| 275 | QVQLQESGGGLVQAGGSLRLSCAASGRTFSNYHMGWFRQAPG | anti-CD3 VHH |
| | KERELVAAISGSGGSTYYTDSVKGRFTISRNNAKNTMSLQMSN | |
| | LKPEDTGVYYCTTPTEKGSSIDYWGQGTQVTVSSGRYPYDVPD | |
| | Y | |
| 276 | MPEEGSGCSVRRRPYGCVLRAALVPLVAGLVICLVVCIQRFAQ | UniProt No. |
| | AOOOLPLESLGWDVAELOLNHTGPOODPRLYWOGGPALGRSF | P32970, CD70- |
| | LHGPELDKGOLRIHRDGIYMVHIOVTLAICSSTTASRHHPTTLA | ECD residues 39-193 |
| | VGICSPASRSISLLRLSFHOGCTIASORLTPLARGDTLCTNLTGT | |
| | LLPSRNTDETFFGVQWVRP | |
| 277 | QVQLVESGGGVVQPGRSLRLSCAASGFTFSSYDMHWVRQAPG | CD70 VH |
| | KGLEWVAVIWYDGSNKYYADSVKGRFTISRDNSKNTLYLQM | |
| | NSLRAEDTAVYYCARGSGNWGFFDYWGQGTLVTVSS | |
| 278 | DIQMTQSPSSLSASVGDRVTITCRASQGISRWLAWYQQKPEKA | CD70 VL |
| | PKSLIYAASSLQSGVPSRFSGSGSGTDFTLTISSLQPEDFATYYC | |
| | QQYNTYPRTFGQGTKVEIK | |
| 279 | QVQLQQSGGGLVQPGGSLRLSCAASGSIFSINGMGWYRQAPG | ICOS sdAb |
| | KERELVAGLTSGGSVTNYADSVKGRFTISRDNAKNTVYLQMN | |
| | SLKPEDTAVYYCRAEIFTRTGENYYGMDYWGKGTQVTVKP | |
| 280 | EVQLVESGGGEVQPGGSLRLSCAASGRMFSNYAMGWFRQAPG | CD28 sdAb |
| | KEREFVAAINYRRDAADYAESVKGRFTISRDNAKNTVYLQMN | |
| | SLRAEDTAVYYCGFTYAGWASSRRDDYNYWGQGTLVTVKP | |
| 281 | RVKFSRSADAPAYQQGQNQLYNELNLGRREEYDVLDKRRGRD | CD3zeta signaling |
| | PEMGGKPRRKNPQEGLYNELQKDKMAEAYSEIGMKGERRRG | domain |
| | KGHDGLYQGLSTATKDTYDALHMQALPPR | |
| 282 | KRGRKKLLYIFKQPFMRPVQTTQEEDGCSCRFPEEEEGGCEL | 4-1BB-derived |
| | | costimulatory |
| | | domain |
| 283 | SKRSRLLHSDYMNMTPRRPGPTRKHYQPYAPPRDFAAYRS | CD28-derived |
| | | costimulatory |
| | | domain |
| 284 | RSKRSRLLHSDYMNMTPRRPGPTRKHYQPYAPPRDFAAYRS | CD28-derived |
| | | costimulatory |
| | | domain 2 |
| 285 | FWVRSKRSRLLHSDYMNMTPRRPGPTRKHYQPYAPPRDFAAY | CD28-derived |
| | RS | costimulatory |
| | | domain 3 |
| 286 | KPTTTPAPRPPTPAPTIASQPLSLRPEASRPAAGGAVHTRGLDFA | CD8-derived hinge |
| | SDIYIWAPLAGTCGVLLLSLVITLYC | and |
| | | transmembrane |
| | | domain |
| 287 | AKPTTTPAPRPPTPAPTIASQPLSLRPEACRPAAGGAVHTRGLD | CD8-derived hinge |
| | FACDIYIWAPLAGTCGVLLLSLVIT | and |
| | | transmembrane |
| | | domain |
| 288 | KPTTTPAPRPPTPAPTIASQPLSLRPEACRPAAGGAVHTRGLDF | CD8 hinge and |
| | ACDIYIWAPLAGTCGVLLLSLVIT | transmembrane |
| | | domain |
| 289 | QVQLQESGPGLVKPSETLSLTCTVSGGSISSGGYFWSWIRQPPG | GITR VH |
| | KGLEWIGYIYYSGTTYYNPSLKSRVTISIDTSKNQFSLKLSSVTA | |
| | ADTAVYYCARDLFYYDTSGPRGFDPWGQGTLVTVSS | |
| 290 | EIVLTQSPGTLSLSPGERATLSCRASQTVSSNYLAWYQQKPGQ | GITR VL |
| | APRLLIYGSSTRATGIPDRFSGSGSGTDFTLTISRLEPEDFAVYY | |
| | CQQYDSSPWTFGQGTKVEIK | |
| 291 | QVQLVESGGGVVQPGRSLRLSCAASGFTFSSYGMHWVRQAPG | GITR VH |
| | KGLEWVAVIWYPGSNKYYAESVKGRFTISRDNSKNTLYLQMN | |
| | SLRAEDTAVYYCARGGELGRYYYYGMDVWGQGTTVTVSS | |
| 292 | DIQMTQSPSSLSASVGDRVTVTCRASQGIRNDLGWYQQKPGK | GITR VL |
| | APKRLIYAASSLQSGVPSRFSGSGSGTEFTLTISSLQPEDFATYY | |
| | CLQHNNYPWTFGQGTKVDIK | |
| 293 | DKTHTCPPCPAPELLGGPSVFLFPPKPKDTLMISRTPEVTCVVV | Knob Fc |
| | DVSHEDPEVKFNWYVDGVEVHNAKTKPREEQYNSTYRVVSV | |
| | LTVLHQDWLNGKEYKCKVSNKALPAPIEKTISKAKGQPREPQV | |
| | YTLPPCRDELTKNQVSLWCLVKGFYPSDIAVEWESNGQPENNY | |
| | KTTPPVLDSDGSFFLYSKLTVDKSRWQQGNVFSCSVMHEALH | |
| | NHYTQKSLSLSPT | |
| 294 | DKTHTCPPCPAPELLGGPSVFLFPPKPKDTLMRSRTPEVTCVVV | Hole Fc |
| | DVSHEDPEVKFNWYVDGVEVHNAKTKPREEQYNSTYRVVSV | |
| | LTVLHQDWLNGKEYKCKVSNKALPAPIEKTISKAKGQPREPQV | |
| | CTLPPSRDELTKNQVSLSCAVKGFYPSDIAVEWESNGQPENNY | |
| | KTTPPVLDSDGSFFLVSKLTVDKSRWQQGNVFSCSVMHEALH | |
| | NHYTQKSLSLSPT | |
| 295 | DKTHTCPPCPAPGGPSVFLFPPKPKDTLMISRTPEVTCVVVDVS | Knob Fc |
| | HEDPEVKFNWYVDGVEVHNAKTKPREEQYNSTYRVVSVLTVL | |
| | HQDWLNGKEYKCKVSNKALPAPIEKTISKAKGQPREPQVYTLP | |
| | PCRDELTKNQVSLWCLVKGFYPSDIAVEWESNGQPENNYKTTP | |
| | PVLDSDGSFFLYSKLTVDKSRWQQGNVFSCSVMHEALHNHYT | |
| | QKSLSLSPT | |
| 296 | DKTHTCPPCPAPGGPSVFLFPPKPKDTLMRSRTPEVTCVVVDVS | Hole Fc |
| | HEDPEVKFNWYVDGVEVHNAKTKPREEQYNSTYRVVSVLTVL | |
| | HQDWLNGKEYKCKVSNKALPAPIEKTISKAKGQPREPQVCTLP | |
| | PSRDELTKNQVSLSCAVKGFYPSDIAVEWESNGQPENNYKTTP | |
| | PVLDSDGSFFLVSKLTVDKSRWQQGNVFSCSVMHEALHNHYT | |
| | QKSLSLSPT | |
| 297 | DKTHTCPPCPAPELLGGPSVFLFPPKPKDTLMISRTPEVTCVVV | Knob Fc |
| | DVSHEDPEVKFNWYVDGVEVHNAKTKPREEQYNSTYRVVSV | |
| | LTVLHQDWLNGKEYKCKVSNKALPAPIEKTISKAKGQPREPQV | |
| | YTLPPCRDELTKNQVSLWCLVKGFYPSDIAVEWESNGQPENNY | |
| | KTTPPVLDSDGSFFLYSKLTVDKSRWQQGNVFSCSVMHEALH | |
| | NHYTQKSLSLSPG | |
| 298 | DKTHTCPPCPAPELLGGPSVFLFPPKPKDTLMRSRTPEVTCVVV | Hole Fc |
| | DVSHEDPEVKFNWYVDGVEVHNAKTKPREEQYNSTYRVVSV | |
| | LTVLHQDWLNGKEYKCKVSNKALPAPIEKTISKAKGQPREPQV | |
| | CTLPPSRDELTKNQVSLSCAVKGFYPSDIAVEWESNGQPENNY | |
| | KTTPPVLDSDGSFFLVSKLTVDKSRWQQGNVFSCSVMHEALH | |
| | NHYTQKSLSLSPG | |
| 299 | DKTHTCPPCPAPGGPSVFLFPPKPKDTLMISRTPEVTCVVVDVS | Knob Fc |
| | HEDPEVKFNWYVDGVEVHNAKTKPREEQYNSTYRVVSVLTVL | |
| | HQDWLNGKEYKCKVSNKALPAPIEKTISKAKGQPREPQVYTLP | |
| | PCRDELTKNQVSLWCLVKGFYPSDIAVEWESNGQPENNYKTTP | |
| | PVLDSDGSFFLYSKLTVDKSRWQQGNVFSCSVMHEALHNHYT | |
| | QKSLSLSPG | |
| 300 | DKTHTCPPCPAPGGPSVFLFPPKPKDTLMRSRTPEVTCVVVDVS | Hole Fc |
| | HEDPEVKFNWYVDGVEVHNAKTKPREEQYNSTYRVVSVLTVL | |
| | HQDWLNGKEYKCKVSNKALPAPIEKTISKAKGQPREPQVCTLP | |
| | PSRDELTKNQVSLSCAVKGFYPSDIAVEWESNGQPENNYKTTP | |
| | PVLDSDGSFFLVSKLTVDKSRWQQGNVFSCSVMHEALHNHYT | |
| | QKSLSLSPG | |
| 301 | DKTHTCPPCPAPELLGGPSVFLFPPKPKDTLMISRTPEVTCVVV | Hole Fc |
| | DVSHEDPEVKFNWYVDGVEVHNAKTKPREEQYNSTYRVVSV | |
| | LTVLHQDWLNGKEYKCKVSNKALPAPIEKTISKAKGQPREPQV | |
| | CTLPPSRDELTKNQVSLSCAVKGFYPSDIAVEWESNGQPENNY | |
| | KTTPPVLDSDGSFFLVSKLTVDKSRWQQGNVFSCSVMHEALH | |
| | NRYTQKSLSLSPT | |
| 302 | DKTHTCPPCPAPGGPSVFLFPPKPKDTLMISRTPEVTCVVVDVS | Hole Fc |
| | HEDPEVKFNWYVDGVEVHNAKTKPREEQYNSTYRVVSVLTVL | |
| | HQDWLNGKEYKCKVSNKALPAPIEKTISKAKGQPREPQVCTLP | |
| | PSRDELTKNQVSLSCAVKGFYPSDIAVEWESNGQPENNYKTTP | |
| | PVLDSDGSFFLVSKLTVDKSRWQQGNVFSCSVMHEALHNRYT | |
| | QKSLSLSPT | |
| 303 | DKTHTCPPCPAPELLGGPSVFLFPPKPKDTLMISRTPEVTCVVV | Hole Fc |
| | DVSHEDPEVKFNWYVDGVEVHNAKTKPREEQYNSTYRVVSV | |
| | LTVLHQDWLNGKEYKCKVSNKALPAPIEKTISKAKGQPREPQV | |
| | CTLPPSRDELTKNQVSLSCAVKGFYPSDIAVEWESNGQPENNY | |
| | KTTPPVLDSDGSFFLVSKLTVDKSRWQQGNVFSCSVMHEALH | |
| | NRYTQKSLSLSPG | |
| 304 | DKTHTCPPCPAPGGPSVFLFPPKPKDTLMISRTPEVTCVVVDVS | Hole Fc |
| | HEDPEVKFNWYVDGVEVHNAKTKPREEQYNSTYRVVSVLTVL | |
| | HQDWLNGKEYKCKVSNKALPAPIEKTISKAKGQPREPQVCTLP | |
| | PSRDELTKNQVSLSCAVKGFYPSDIAVEWESNGQPENNYKTTP | |
| | PVLDSDGSFFLVSKLTVDKSRWQQGNVFSCSVMHEALHNRYT | |
| | QKSLSLSPG | |
| 305 | DKTHTCPPCPAPELLGGPSVFLFPPKPKDTLYISRTPEVTCVVVD | Knob Fc |
| | VSHEDPEVKFNWYVDGVEVHNAKTKPREEQYNSTYRVVSVLT | |
| | VLHQDWLNGKEYKCKVSNKALPAPIEKTISKAKGQPREPQVYT | |
| | LPPCRDELTKNQVSLWCLVKGFYPSDIAVEWESNGQPENNYKT | |
| | TPPVLDSDGSFFLYSKLTVDKSRWQQGNVFSCSVVHEALHNH | |
| | YTQKSLSLSPT | |
| 306 | DKTHTCPPCPAPGGPSVFLFPPKPKDTLYISRTPEVTCVVVDVS | Knob Fc |
| | HEDPEVKFNWYVDGVEVHNAKTKPREEQYNSTYRVVSVLTVL | |
| | HQDWLNGKEYKCKVSNKALPAPIEKTISKAKGQPREPQVYTLP | |
| | PCRDELTKNQVSLWCLVKGFYPSDIAVEWESNGQPENNYKTTP | |
| | PVLDSDGSFFLYSKLTVDKSRWQQGNVFSCSVVHEALHNHYT | |
| | QKSLSLSPT | |
| 307 | DKTHTCPPCPAPELLGGPSVFLFPPKPKDTLYISRTPEVTCVVVD | Knob Fc |
| | VSHEDPEVKFNWYVDGVEVHNAKTKPREEQYNSTYRVVSVLT | |
| | VLHQDWLNGKEYKCKVSNKALPAPIEKTISKAKGQPREPQVYT | |
| | LPPCRDELTKNQVSLWCLVKGFYPSDIAVEWESNGQPENNYKT | |
| | TPPVLDSDGSFFLYSKLTVDKSRWQQGNVFSCSVVHEALHNH | |
| | YTQKSLSLSPG | |
| 308 | DKTHTCPPCPAPGGPSVFLFPPKPKDTLYISRTPEVTCVVVDVS | Knob Fc |
| | HEDPEVKFNWYVDGVEVHNAKTKPREEQYNSTYRVVSVLTVL | |
| | HQDWLNGKEYKCKVSNKALPAPIEKTISKAKGQPREPQVYTLP | |
| | PCRDELTKNQVSLWCLVKGFYPSDIAVEWESNGQPENNYKTTP | |
| | PVLDSDGSFFLYSKLTVDKSRWQQGNVFSCSVVHEALHNHYT | |
| | QKSLSLSPG | |
| 309 | DKTHTCPPCPAPELLGGPSVFLFPPKPKDTLYISRTPEVTCVVVD | Hole Fc |
| | VSHEDPEVKFNWYVDGVEVHNAKTKPREEQYNSTYRVVSVLT | |
| | VLHQDWLNGKEYKCKVSNKALPAPIEKTISKAKGQPREPQVCT | |
| | LPPSRDELTKNQVSLSCAVKGFYPSDIAVEWESNGQPENNYKT | |
| | TPPVLDSDGSFFLVSKLTVDKSRWQQGNVFSCSVVHEALHNRY | |
| | TQKSLSLSPT | |
| 310 | DKTHTCPPCPAPGGPSVFLFPPKPKDTLYISRTPEVTCVVVDVS | Hole Fc |
| | HEDPEVKFNWYVDGVEVHNAKTKPREEQYNSTYRVVSVLTVL | |
| | HQDWLNGKEYKCKVSNKALPAPIEKTISKAKGQPREPQVCTLP | |
| | PSRDELTKNQVSLSCAVKGFYPSDIAVEWESNGQPENNYKTTP | |
| | PVLDSDGSFFLVSKLTVDKSRWQQGNVFSCSVVHEALHNRYT | |
| | QKSLSLSPT | |
| 311 | DKTHTCPPCPAPELLGGPSVFLFPPKPKDTLYISRTPEVTCVVVD | Hole Fc |
| | VSHEDPEVKFNWYVDGVEVHNAKTKPREEQYNSTYRVVSVLT | |
| | VLHQDWLNGKEYKCKVSNKALPAPIEKTISKAKGQPREPQVCT | |
| | LPPSRDELTKNQVSLSCAVKGFYPSDIAVEWESNGQPENNYKT | |
| | TPPVLDSDGSFFLVSKLTVDKSRWQQGNVFSCSVVHEALHNRY | |
| | TQKSLSLSPG | |
| 312 | DKTHTCPPCPAPGGPSVFLFPPKPKDTLYISRTPEVTCVVVDVS | Hole Fc |
| | HEDPEVKFNWYVDGVEVHNAKTKPREEQYNSTYRVVSVLTVL | |
| | HQDWLNGKEYKCKVSNKALPAPIEKTISKAKGQPREPQVCTLP | |
| | PSRDELTKNQVSLSCAVKGFYPSDIAVEWESNGQPENNYKTTP | |
| | PVLDSDGSFFLVSKLTVDKSRWQQGNVFSCSVVHEALHNRYT | |
| | QKSLSLSPG | |
| 313 | (GGGGS)n, wherein n is 1 to 5 | Linker |
| 314 | (GGGGGS)n, wherein n is 1 to 4 | linker |
| 315 | GGGGS | Linker |
| 316 | GGGGGS | Linker |
| 317 | GGGGGSGGGGGSGGGGGS | Linker |
| 318 | GGGGSGGGGSGGGGS | Linker |
| 319 | GGSGGGGSGGGGSGGGGS | Linker |
| 320 | GlyxXaa-Glyy-Xaa-Glyz | Linker |
| | Xaa is independently selected from A, | |
| | V, L, I, M, F, W, P, G, S, T, C, | |
| | Y, N, Q, K, R, H, D, or E | |
| | x, y, and z are each integers | |
| | in the range from 1-5 | |
| 321 | Gly-Gly-Gly-Xaa-Gly-Gly-Gly-Xaa-Gly-Gly-Gly | Linker |
| | Xaa is independently selected from A, | |
| | V, L, I, M, F, W, P, G, S, T, C, | |
| | Y, N, Q, K, R, H, D, or E | |
| 322 | (SSSSG)n | Linker |
| | n = l-9 | |
| 323 | GGGGG-C-GGGGG | Linker |
| 324 | (EAAAK)n | Linker |
| | n = 2-20 | |
| 325 | AS-(AP)n-GT | Linker |
| | n = 2-20 | |
| 326 | AS-(EAAAK)n-GT | Linker |
| | n = 2-20 | |
| 327 | (GGGGA)n | Linker |
| | n = 2-20 | |
| 328 | (PGGGS)n | Linker |
| | n = 2-20 | |
| 329 | (AGGGS)n | Linker |
| | n = 2-20 | |
| 330 | GGS-(EGKSSGSGSESKST)n-GGS | Linker |
| | n = 2-20 | |
| 331 | SSSASASSA | Linker |
| 332 | GSPGSPG | Linker |
| 333 | ATTTGSSPGPT | Linker |
| 334 | X1 X2 X3 X4 X5 (P4 P3 P2 P1 ↓ P1′) | Linker consensus |
| | Xl = I, L, Y, M, F, V, or A; | |
| | (P4 = 1, L, Y, M, F, V, or A) | |
| | X2 = A, G, S, V, E, D, Q, N, or Y; | |
| | (P3 = A, G, S, V, E, D, Q, N, or Y) | |
| | X3 = H, P, A, V, G, S, or T; | |
| | (P2 = H, P, A, V, G, S, or T) | |
| | X4 = D or E; (P1 = D or E) | |
| | X5 = 1, L, Y, M, F, V, T, S, G or A | |
| | (P1′ = I, L, Y, M, F, V, T, S, G or | |
| | A) | |
| 335 | X1 E X3 D X5 (P4 P3 P2 P1 ↓ P1′) | Linker consensus |
| | X1 = I or L; (P4 = I or L) | |
| | (P3 = E) | |
| | X3 = P or A; (P2 = P or A) | |
| | X5 = 1, V, T, S, or G | |
| | (P1′ = I, V, T, S, or G) | |
| 336 | LEAD | granzyme B |
| | | substrate |
| 337 | LEPD | Linker |
| 338 | LEAE | Linker |
| 339 | IEPDI | Linker |
| 340 | LEPDG | Linker |
| 341 | LEADT | Linker |
| 342 | IEPDG | Linker |
| 343 | IEPDV | Linker |
| 344 | IEPDS | Linker |
| 345 | IEPDT | Linker |
| 346 | X1QARX5 (P1QAR↓A/V)) | Linker consensus |
| | X1 = any amino acid; | |
| | (Pl is any amino acid) | |
| | X5 = A or V | |
| 347 | RQARX5 (RQAR(A/V)) | Linker |
| | X5 = A or V | |
| 348 | RQAR | matriptase |
| | | substrate |
| 349 | RQARV | linker |
| 350 | X1X2 X3 X4 (P3 P2 P1 ↓ P1′) | Linker consensus |
| | X1 = P, V or A; (P3 = P, V or A) | |
| | X2 = Q or D; (P2 = Q or D) | |
| | X3 = A or N; (P1 = A or N) | |
| | X4 = L, I or M (PF = L, I or M) | |
| 351 | PX2X3X4 (P3 P2 P1 ↓ P1′) | Linker consensus |
| | (P3 = P) | |
| | X2 = Q or D; (P2 = Q or D) | |
| | X3 = A or N; (P1 is A or N) | |
| | X4 = L or I (P1′ is L or I) | |
| 352 | PAGL | MMP substrate |
| 353 | TGLEADGSPAGLGRQARVG | Linker |
| 354 | TGLEADGSRQARVGPAGLG | Linker |
| 355 | TGSPAGLEADGSRQARVGS | Linker |
| 356 | TGPAGLGLEADGSRQARVG | Linker |
| 357 | TGRQARVGLEADGSPAGLG | Linker |
| 358 | TGSRQARVGPAGLEADGS | Linker |
| 359 | TGPAGLGSRQARVGLEADGS | Linker |
| 360 | GPAGLGLEPDGSRQARVG | Linker |
| 361 | GGSGGGGIEPDIGGSGGS | Linker |
| 362 | GGSGGGGLEADTGGSGGS | Linker |
| 363 | GSIEPDIGS | Linker |
| 364 | GSLEADTGS | Linker |
| 365 | GGSGGGGIEPDGGGSGGS | Linker |
| 366 | GGSGGGGIEPDVGGSGGS | Linker |
| 367 | GGSGGGGIEPDSGGSGGS | Linker |
| 368 | GGSGGGGIEPDTGGSGGS | Linker |
| 369 | GGGSLEPDGSGS | Linker |
| 370 | GPAGLGLEADGSRQARVG | Linker |
| 371 | GGEGGGGSGGSGGGS | Linker |
| 372 | GSSAGSEAGGSGQAGVGS | Linker |
| 373 | GGSGGGGLEAEGSGGGGS | Linker |
| 374 | GGSGGGGIEPDPGGSGGS | Linker |
| 375 | TGGSGGGGIEPDIGGSGGS | Linker |
| 376 | ACPWAVSGARASPGSAASPRLREGPELSPDDPAGLLDLRQGMF | 41BBL |
| | AQLVAQNVLLIDGPLSWYSDPGLAGVSLTGGLSYKEDTKELV | |
| | VAKAGVYYVFFQLELRRVVAGEGSGSVSLALHLQPLRSAAGA | |
| | AALALTVDLPPASSEANSAFGFQGRLLHLSAGQRLGVHLHTEA | |
| | RARHAWQLTQGATVLGLFRVTPEIPAGLPSPRSE | |
| 377 | EVQLVQSGAEVKKPGESLRISCKGSGYSFSTYWISWVRQMPGK | 41BB VH |
| | GLEWMGKIYPGDSYTNYSPSFQGQVTISADKSISTAYLQWSSL | |
| | KASDTAMYYCARGYGIFDYWGQGTLVTVSS | |
| 378 | SYELTQPPSVSVSPGQTASITCSGDNIGDQYAHWYQQKPGQSP | 41BB VL |
| | VLVIYQDKNRPSGIPERFSGSNSGNTATLTISGTQAMDEADYYC | |
| | ATYTGFGSLAVFGGGTKLTVL | |
| 379 | QVQLQQWGAGLLKPSETLSLTCAVYGGSFSGYYWSWIRQSPE | 41BB VH |
| | KGLEWIGEINHGGYVTYNPSLESRVTISVDTSKNQFSLKLSSVT | |
| | AADTAVYYCARDYGPGNYDWYFDLWGRGTLVTVSS | |
| 380 | EIVLTQSPATLSLSPGERATLSCRASQSVSSYLAWYQQKPGQAP | 41BB VL |
| | RLLIYDASNRATGIPARFSGSGSGTDFTLTISSLEPEDFAVYYCQ | |
| | QRSNWPPALTFGGGTKVEIK | |
| 381 | QMQLVQSGAEVKKPGASVKVSCKASGYSFSGYYMHWVRQAP | 41BB VH |
| | GQGLEWMGWVNPMSGGTNYAQKFQGRVTITRDTSASTAYME | |
| | LSSLRSEDTAVYYCAREGMAMRLELDKWGQGTLVTVSS | |
| 382 | SYELTQPPSVSVAPGKTARITCGGNNIGSKSVHWYQQKPGQAP | 41BB VL |
| | VLVIYYDSDRPSGIPERFSGSNSGNTATLTISRVEAGDEADYYC | |
| | QVWDSSSVVFGGGTQLTVL | |
| 383 | QDSTSDLIPAPPLSKVPLQQNFQDNQFHGKWYVVGQAGNIKLR | 4IBB Antica1in |
| | EDKDPNKMMATIYELKEDKSYNVTGVTFDDKKCTYAISTFVP | |
| | GSQPGEFTLGKIKSFPGHTSSLVRVVSTNYNQHAMVFFKFVFQ | |
| | NREEFYITLYGRTKELTSELKENFIRFSKSLGLPENHIVFPVP | |
| | IDQCIDG | |
| 384 | QDSTSDLIPAPPLSKVPLQQNFQDNQFHGKWYVVGQAGNIRLR | 4IBB Antica1in |
| | EDKDPIKMMATIYELKEDKSYDVTMVKFDDKKCMYDIWTFVP | |
| | GSQPGEFTLGKIKSFPGHTSSLVRVVSTNYNQHAMVFFKFVFQ | |
| | NREEFYITLYGRTKELTSELKENFIRFSKSLGLPENHIVFPVP | |
| | IDQCIDG | |
| 385 | QDSTSDLIPAPPLSKVPLQQNFQDNQFHGKWYVVGQAGNIRLR | 4IBB Antica1in |
| | EDKDPNKMMATIYELKEDKSYDVTAVAFDDKKCTYDIWTFVP | |
| | GSQPGEFTLGKIKSFPGHTSSLVRVVSTNYNQHAMVFFKFVFQ | |
| | NREEFYITLYGRTKELTSELKENFIRFSKSLGLPENHIVFPVP | |
| | IDQCIDG | |
| 386 | QDSTSDLIPAPPLSKVPLQQNFQDNQFHGKWYVVGQAGNIKLR | 4IBB Antica1in |
| | EDKDPNKMMATIYELKEDKSYDVTAVAFDDKKCTYDIWTFVP | |
| | GSQPGEFTLGKIKSFPGHTSSLVRVVSTNYNQHAMVFFKFVFQ | |
| | NREEFYITLYGRTKELTSELKENFIRFSKSLGLPENHIVFPVP | |
| | IDQCIDG | |
| 387 | QDSTSDLIPA PPLSKVPLQQ NFQDNQFHGK WYVVGQAGNI | 4IBB Antica1in |
| | KLREDSKMMA TIYELKEDKS YDVTGVSFDD KKCTYAIMTF | |
| | VPGSQPGEFT LGKIKSFPGH TSSLVRVVST NYNQHAMVFF | |
| | KFVFQNREEF YITLYGRTKE LTSELKENFI RFSKSLGLPE | |
| | NHIVFPVPID QCIDG | |
| 388 | QDSTSDLIPA PPLSKVPLQQ NFQDNQFHGK WYVVGQAGNI | 4IBB Antica1in |
| | KLREDKDPVK MMATIYELKE DKSYDVTGVT FDDKKCRYDI | |
| | STFVPGSQPG EFTFGKIKSF PGHTSSLVRV VSTNYNQHAM | |
| | VFFKFVFQNR EEFYITLYGR TKELTSELKE NFIRFSKSLG | |
| | LPENHIVFPV PIDQCIDG | |
| 389 | QDSTSDLIPAPPLSKVPLQQNFQDNQFHGKWYVVGQAGNIRLR | 4IBB Antica1in |
| | EDKDPHKMMATIYELKEDKSYDVTGVTFDDKKCTYAISTFVP | |
| | GSQPGEFTLGKIKSFPGHTSSLVRVVSTNYNQHAMVFFKFVFQ | |
| | NREEFYITLYGRTKELTSELKENFIRFSKSLGLPENHIVFPVP | |
| | IDQCIDG | |
| 390 | QDSTSDLIPAPPLSKVPLQQNFQDNQFHGKWYVVGQAGNIKLR | 4IBB Antica1in |
| | EDKDPNKMMATIYELKEDKSYDVTGVTFDDKKCTYAISTLVP | |
| | GSQPGEFTFGKIKSFPGHTSSLVRVVSTNYNQHAMVFFKFVFQ | |
| | NREEFYITLYGRTKELTSELKENFIRFSKSLGLPENHIVFPVP | |
| | IDQCIDG | |
| 391 | QDSTSDLIPAPPLSKVPLQQNFQDNQFHGKWYVVGQAGNIRLR | 4IBB Antica1in |
| | EDKDPSKMMATIYELKEDKSYDVTAVTFDDKKCNYAISTFVPG | |
| | SQPGEFTLGKIKSFPGHTSSLVRVVSTNYNQHAMVFFKFVFQN | |
| | REEFYITLYGRTKELTSELKENFIRFSKSLGLPENHIVFPVPI | |
| | DQCIDG | |
| 392 | REGPELSPDDPAGLLDLRQGMFAQLVAQNVLLIDGPLSWYSDP | 71-254 of human |
| | GLAGVSLTGGLSYKEDTKELVVAKAGVYYVFFQLELRRVVAG | 41BBL |
| | EGSGSVSLALHLQPLRSAAGAAALALTVDLPPASSEARNSAFG | |
| | FQGRLLHLSAGQRLGVHLHTEARARHAWQLTQGATVLGLFRV | |
| | TPEIPAGLPSPRSE | |
| 393 | LDLRQGMFAQLVAQNVLLIDGPLSWYSDPGLAGVSLTGGLSY | 85-254 of human |
| | KEDTKELVVAKAGVYYVFFQLELRRVVAGEGSGSVSLALHLQ | 41BBL |
| | PLRSAAGAAALALTVDLPPASSEARNSAFGFQGRLLHLSAGQR | |
| | LGVHLHTEARARHAWQLTQGATVLGLFRVTPEIPAGLPSPRSE | |
| 394 | DPAGLLDLRQGMFAQLVAQNVLLIDGPLSWYSDPGLAGVSLT | 80-254 of human |
| | GGLSYKEDTKELVVAKAGVYYVFFQLELRRVVAGEGSGSVSL | 41BBL |
| | ALHLQPLRSAAGAAALALTVDLPPASSEARNSAFGFQGRLLHL | |
| | SAGQRLGVHLHTEARARHAWQLTQGATVLGLFRVTPEIPAGLP | |
| | SPRSE | |
| 395 | PWAVSGARASPGSAASPRLREGPELSPDDPAGLLDLRQGMFAQ | 52-254 of human |
| | LVAQNVLLIDGPLSWYSDPGLAGVSLTGGLSYKEDTKELVVA | 4-1BBL |
| | KAGVYYVFFQLELRRVVAGEGSGSVSLALHLQPLRSAAGAAA | |
| | LALTVDLPPASSEARNSAFGFQGRLLHLSAGQRLGVHLHTEAR | |
| | ARHAWQLTQGATVLGLFRVTPEIPAGLPSPRSE | |
| 396 | REGPELSPDDPAGLLDLRQGMFAQLVAQNVLLIDGPLSWYSDP | 71-248 of human |
| | GLAGVSLTGGLSYKEDTKELVVAKAGVYYVFFQLELRRVVAG | 41BBL |
| | EGSGSVSLALHLQPLRSAAGAAALALTVDLPPASSEARNSAFG | |
| | FQGRLLHLSAGQRLGVHLHTEARARHAWQLTQGATVLGLFRV | |
| | TPEIPAGL | |
| 397 | LDLRQGMFAQLVAQNVLLIDGPLSWYSDPGLAGVSLTGGLSY | 85-248 of human |
| | KEDTKELVVAKAGVYYVFFQLELRRVVAGEGSGSVSLALHLQ | 41BBL |
| | PLRSAAGAAALALTVDLPPASSEARNSAFGFQGRLLHLSAGQR | |
| | LGVHLHTEARARHAWQLTQGATVLGLFRVTPEIPAGL | |
| 398 | DPAGLLDLRQGMFAQLVAQNVLLIDGPLSWYSDPGLAGVSLT | 80-248 of human |
| | GGLSYKEDTKELVVAKAGVYYVFFQLELRRVVAGEGSGSVSL | 41BBL |
| | ALHLQPLRSAAGAAALALTVDLPPASSEARNSAFGFQGRLLHL | |
| | SAGQRLGVHLHTEARARHAWQLTQGATVLGLFRVTPEIPAGL | |
| 399 | PWAVSGARASPGSAASPRLREGPELSPDDPAGLLDLRQGMFAQ | 52-248 of human |
| | LVAQNVLLIDGPLSWYSDPGLAGVSLTGGLSYKEDTKELVVA | 41BBL |
| | KAGVYYVFFQLELRRVVAGEGSGSVSLALHLQPLRSAAGAAA | |
| | LALTVDLPPASSEARNSAFGFQGRLLHLSAGQRLGVHLHTEAR | |
| | ARHAWQLTQGATVLGLFRVTPEIPAGL | |
| 400 | EVQLLESGGGEVQPGGSLRLSCAASGFSFSINAMGWYRQAPGK | 4IBB sdAb |
| | RREFVAAIESGRNTVYAESVKGRFTISRDNAKNTVYLQMSSLR | |
| | AEDTAVYYCGLLKGNRVVSPSVAYWGQGTLVTVKP | |
| 401 | QVSHRYPRIQSIKVQFTEYKKEKGFILTSQKEDEIMKVQNNSVII | 0X40 1igand |
| | NCDGFYLISLKGYFSQEVNISLHYQKDEEPLFQLKKVRSVNSL | |
| | MVASLTYKDKVYLNVTTDNTSLDDFHVNGGELILIHQNPGEFC | |
| | VL | |
| 402 | QVSHRYPRFQ SIKVQFTEYK KEKGFILTSQ KEDEIMKVQN | 0X40 1igand |
| | NSVIINCDGF YLISLKGYFS QEVNISLHYQ KDEEPLFQLK | |
| | KVRSVNSLMV ASLTYKDKVY LNVTTDNTSL DDFHVNGGEL | |
| | ILIHQNPGEFCVL | |
| 403 | QVSHRYPRIQSIKVQFTEYKKEKGFILTSQKEDEIMKVQNNSVII | 0X40 1igand |
| | NCDGFYLISLKGYFSQEVNISLHYQKDEEPLFQLKKVRSVNSL | |
| | MVASLTYKDKVYLNVTTDNTSLDDFHVNGGELILIHQNPGEFC | |
| | VL | |
| 404 | QVSHRYPRIQ SIKVQFTEYK KEKGFILTSQ KEDEIMKVQN | 0X40 1igand |
| | NSVIINCDGF YLISLKGYFS QEVNISLHYQ KDEEPLFQLK | |
| | KVRSVNSLMV ASLTYKDKVY LNVTTDNTSL DDFHVNGGEL | |
| | ILIHQNPGEF CVL | |
| 405 | VSHRYPRIQSIKVQFTEYKKEKGFILTSQKEDEIMKVQNNSVIIN | 0X40 1igand |
| | CDGFYLISLKGYFSQEVNISLHYQKDEEPLFQLKKVRSVNSLM | |
| | VASLTYKDKVYLNVTTDNTSLDDFHVNGGELILIHQNPGEFCV | |
| | L | |
| 406 | EVQLVQSGAEVKKPGASVKVSCKASGYTFTDSYMSWVRQAP | 0X40 VH |
| | GQGLEWIGDMYPDNGDSSYNQKFRERVTITRDTSTSTAYLELS | |
| | SLRSEDTAVYYCVLAPRWYFSVWGQGTLVTVSS | |
| 407 | DIQMTQSPSSLSASVGDRVTITCRASQDISNYLNWYQQKPGKA | 0X40 VL |
| | PKLLIYYTSRLRSGVPSRFSGSGSGTDFTLTISSLQPEDFATYYC | |
| | QQGHTLPPTFGQGTKVEIKRT | |
| 408 | EVQLVESGGGLVQPGGSLKLSCAASGFTFSGSAMHWVRQASG | 0X40 VH |
| | KGLEWVGRIRSKANSYATAYAASVKGRFTISRDDSKNTAYLQ | |
| | MNSLKTEDTAVYYCTSGIYDSSGYDYWGQGTLVTVSS | |
| 409 | DIVMTQSPLSLPVTPGEPASISCRSSQSLLHSNGYNYLDWYLQK | 0X40 VL |
| | PGQSPQLLIYLGSNRASGVPDRFSGSGSGTDFTLKISRVEAEDV | |
| | GVYYCMQALQTPLTFGGGTKVEIK | |
| 410 | EVQLLESGGGEVQPGGSLRLSCAASGFTFSDAFMYWVRQAPG | 0X40 sdAb |
| | KGLEWVSSISNRGLKTAYAESVKGRFTISRDNAKNTLYLQMSS | |
| | LRAEDTAVYYCSRDVDGDFRGQGTLVTVKP | |
| 411 | QLETAKEPCMAKFGPLPSKWQMASSEPPCVNKVSDWKLEILQ | GITR 1igand |
| | NGLYLIYGQVAPNANYNDVAPFEVRLYKNKDMIQTLTNKSKI | |
| | QNVGGTYELHVGDTIDLIFNSEHQVLKNNTYWGIILLANPQFIS | |
| 412 | QVQLVESGGGVVQPGRSLRLSCAASGFTFSSYAMSWVRQAPG | GITR VH |
| | KGLEWVASISSGGTTYYPDSVKGRFTISRDNSKNTLYLQMNSL | |
| | RAEDTAVYYCARVGGYYDSMDYWGQGTLVTVSS | |
| 413 | EIVLTQSPGTLSLSPGERATLSCRASESVDNYGVSFMNWYQQK | GITR VL |
| | PGQAPRLLIYAASNQGSGIPDRFSGSGSGTDFTLTISRLEPEDFA | |
| | VYYCQQTKEVTWTFGQGTKVEIK | |
| 414 | QVTLRESGPALVKPTQTLTLTCTFSGFSLSTSGMGVGWIRQPPG | GITR VH |
| | KALEWLAHIWWDDDKYYQPSLKSRLTISKDTSKNQVVLTMTN | |
| | MDPVDTATYYCARTRRYFPFAYWGQGTLVTVSS | |
| 415 | EIVMTQSPATLSVSPGERATLSCKASQNVGTNVAWYQQKPGQ | GITR VL |
| | APRLLIYSASYRYSGIPARFSGSGSGTEFTLTISSLQSEDFAVYYC | |
| | QQYNTDPLTFGGGTKVEIK | |
| 416 | EVQLLESGGGEVQPGGSLRLSCAASGSVFSIDAMGWYRQAPG | GITR sdAb |
| | KQRELVAVLSGISSAKYAASAPGRFTISRDNAKNTVYLQMSSL | |
| | RAEDTAVYYCYADVSTGWGRDAHGYWGQGTLVTV | |
| 417 | QAVVTQEPSLTVSPGGTVTLTCGSSTGAVTTSNYANWVQQKP | anti-CD3 VL |
| | GQAFRGLIGGTNKRAPGVPARFSGSLLGGKAALTISGAQPEDE | (CON) |
| | ADYYCALWYSNHWVFGCGTKLTVL | |
| 418 | DIQLTQSPSF LSASVGDRVT ITCKASQNVD TNVAWYQQKP | First Po1ypeptide |
| | GKAPKALIYSASYRYSGVPS RFSGSGSGTD FTLTISSLQP | Chain ofB7-H3x |
| | EDFATYYCQQ YNNYPFTFGQGTKLEIKGGG SGGGGEVQLV | CD3 Bispecific |
| | ESGGGLVQPG GSLRLSCAAS GFTFSTYAMNWVRQAPGKGL | DART-A Diabody |
| | EWVGRIRSKY NNYATYYADS VKDRFTISRD DSKNSLYLQM | |
| | NSLKTEDTAV YYCVRHGNFG NSYVSWFAYW GQGTLVTVSS | |
| | GGCGGGEVAA LEKEVAALEK EVAALEKEVA ALEKGGGDKT | |
| | HTCPPCPAPE AAGGPSVFLFPPKPKDTLMI SRTPEVTCVV | |
| | VDVSHEDPEV KFNWYVDGVE VHNAKTKPRE EQYNSTYRVV | |
| | SVLTVLHQDW LNGKEYKCKV SNKALPAPIE | |
| | KTISKAKGQPREPQVYTLPP SREEMTKNQV SLWCLVKGFY | |
| | PSDIAVEWES NGQPENNYKTTPPVLDSDGS FFLYSKLTVD | |
| | KSRWQQGNVF SCSVMHEALH NHYTQKSLSLSPGK | |
| 419 | QAVVTQEPSLTVSPGGTVTLTCRSSTGAVTTSNYANWVQQKP | Second |
| | GQAPRGLIGGTNKRAPWTPARFSGSLLGGKAALTITGAQAEDE | Po1ypeptide Chain |
| | ADYYCALWYSNLWVFGGGTKLTVLGGGGSGGGGEVQLVESG | ofB7-H3xCD3 |
| | GGLVQPGGSLRLSCAASGFTFSSFGMHWVRQAPGKGLEWVAY | Bispecific DART- |
| | ISSDSSAIYYADTVKGRFTISRDNAKNSLYLQMNSLRDEDTAVY | A Diabody |
| | YCGRGRENIYYGSRLDYWGQGTTVTVSSGGCGGGKVAALKE | |
| | KVAALKEKVAALKEKVAALKE | |
| 420 | DKTHTCPPCPAPEAAGGPSVFLFPPKPKDTLMISRTPEVTCVVV | Third Po1ypeptide |
| | DVSHEDPEVKFNWYVDGVEVHNAKTKPREEQYNSTYRVVSV | Chain ofB7-H3x |
| | LTVLHQDWLNGKEYKCKVSNKALPAPIEKTISKAKGQPREPQV | CD3 Bispecific |
| | YTLPPSREEMTKNQVSLSCAVKGFYPSDIAVEWESNGQPENNY | DART-A Diabody |
| | KTTPPVLDSDGSFFLVSKLTVDKSRWQQGNVFSCSVMHEALH | |
| | NRYTQKSLSLSPGK | |
| 421 | EVQLVESGGGEVQPGGSLRLSCAASGSMTGANTMGWYRQAP | hz18H10v1 |
| | GKGRDLVSLIGNYVTHYAESVKGRFTISRDNAKNTLYLQMSSL | |
| | RAEDTAVYYCYLYTDNLGTSWGQGTLVTVKPGG | |
| 422 | EVQLVESGGGEVQPGGSLRLSCAASGSMTGANTMGWYRQAP | hz18H10v2 |
| | GKQRDLVSLIGNYVTHYAESVKGRFTISRDNAKNTLYLQMSSL | |
| | RAEDTAVYYCYLYTDNLGTSWGQGTLVTVKPGG | |
| 423 | EVQLVESGGGEVQPGGSLRLSCAASGSMTGANTMGWYRQAP | hz18H10v3 |
| | GKQRDLVSLIGNYVTHYAESVKGRFTISRDNAKNTVYLQMSSL | |
| | RAEDTAVYYCYLYTDNLGTSWGQGTLVTVKPGG | |
| 424 | EVQLVESGGGEVQPGGSLRLSCAASGSMTGANTMGWYRQAP | hz18H10v4 |
| | GKQRDLVALIGNYVTHYAESVKGRFTISRDNAKNTVYLQMSS | |
| | LRAEDTAVYYCYLYTDNLGTSWGQGTLVTVKPGG | |
| 425 | EVQLVESGGGEVQPGGSLRLSCAASGSMTGANTMGWYRQAP | hz18H10v5 |
| | GKQRDLVALIGNYVTHYAESVKGRFTISRENAKNTVYLQMSSL | |
| | RAEDTAVYYCYLYTDNLGTSWGQGTLVTVKPGG | |
| 426 | EVQLVESGGGEVQPGGSLRLSCAASGSVTGANTMGWYRQAPG | hz18H10v6 |
| | KQRDLVALIGNYVTHYAESVKGRFTISRDNAKNTVYLQMSSLR | |
| | AEDTAVYYCYLYTDNLGTSWGQGTLVTVKPGG | |
| 427 | EVQLVESGGGEVQPGGSLRLSCAASGSITGANTMGWYRQAPG | hz18H10v7 |
| | KQRDLVALIGNYVTHYAESVKGRFTISRDNAKNTVYLQMSSLR | |
| | AEDTAVYYCYLYTDNLGTSWGQGTLVTVKPGG | |
| 428 | EVQLVESGGGEVQPGGSLRLSCAASGSVTGANTMGWYRQAPG | hz18H10v8 |
| | KQRDLVSLIGNYVTHYAESVKGRFTISRDNAKNTLYLQMSSLR | |
| | AEDTAVYYCYLYTDNLGTSWGQGTLVTVKPGG | |
| 429 | EVQLVESGGGEVQPGGSLRLSCAASGSVTGANTMGWYRQAPG | hz18H10v9 |
| | KQRDLVSLIGNYVTHYAESVKGRFTISRDNAKNTVYLQMSSLR | |
| | AEDTAVYYCYLYTDNLGTSWGQGTLVTVKPGG | |
| 430 | EVQLVESGGGEVQPGGSLRLSCAASGSMTGANTMGWYRQAP | hz18H10v10 |
| | GKQRDLVSLIGNYVTHYAESVKGRFTISRENAKNTVYLQMSSL | |
| | RAEDTAVYYCYLYTDNLGTSWGQGTLVTVKPGG | |
| 431 | EVQLVESGGGEVQPGGSLRLSCAASGSVTGANTMGWYRQAPG | hz18H10v11 |
| | KQRDLVSLIGNYVTHYAESVKGRFTISRENAKNTVYLQMSSLR | |
| | AEDTAVYYCYLYTDNLGTSWGQGTLVTVKPGG | |
| 432 | EVQLVESGGGEVQPGGSLRLSCAASGSVTGANTMGWYRQAPG | hz18H10v12 |
| | KQRDLVALIGNYVTHYAESVKGRFTISRENAKNTVYLQMSSLR | |
| | AEDTAVYYCYLYTDNLGTSWGQGTLVTVKPGG | |
| 433 | EVQLVESGGGEVQPGGSLRLSCAASGSMTGANTMGWYRQAP | hz18H10v13 |
| | GKQRELVALIGNYVTHYAESVKGRFTISRENAKNTVYLQMSSL | |
| | RAEDTAVYYCYLYTDNLGTSWGQGTLVTVKPGG | |
| 434 | EVQLVESGGGEVQPGGSLRLSCAASGSVTGANTMGWYRQAPG | hz18H10v14 |
| | KQRDLVALIGNYVTHYAESVKGRFTISRDNAKNTLYLQMSSLR | |
| | AEDTAVYYCYLYTDNLGTSWGQGTLVTVKPGG | |
| 435 | EVQLVESGGGEVQPGGSLRLSCAASGSITGANTMGWYRQAPG | hz18H10v15 |
| | KQRDLVALIGNYVTHYAESVKGRFTISRDNAKNTLYLQMSSLR | |
| | AEDTAVYYCYLYTDNLGTSWGQGTLVTVKPGG | |
| 436 | EVQLVESGGGEVQPGGSLRLSCAASGSITGANTMGWYRQAPG | hz18H10v16 |
| | KQRDLVALIGNYVTHYAESVKGRFTISRENAKNTVYLQMSSLR | |
| | AEDTAVYYCYLYTDNLGTSWGQGTLVTVKPGG | |
| 437 | EVQLVESGGGEVQPGGSLRLSCAASGSITGANTMGWYRQAPG | hz18H10v17 |
| | KQRDLVALIGNYVTHYAESVKGRFTISRDNAKNTVYLQMNSL | |
| | RAEDTAVYYCYLYTDNLGTSWGQGTLVTVKPGG | |
| 438 | GSMTGANTMG | CDRH1 |
| 439 | GSVTGANTMG | CDRH1 |
| 440 | GSITGANTMG | CDRH1 |
| 441 | LIGNYVTH | CDRH2 |
| 442 | YTDNLGTS | CDRH3 |
| 443 | QVQLVQSGGGLVQPGGSLRLSCVASGSMTGANTMGWYRQAP | 18H10 |
| | GKQRDLVALIGNYHYADSVKGRFTISRENAKNTVILQMNSLNP | |
| | EDTAVYYCYLYTDNLGTSWGQGTLVTVKPGG | |
| 444 | PGGGG | linker |
| 445 | DKTHTCPPCPAPELLGGPSVFLFPPKPKDTLMISRTPEVTCVVV | Knob Fc |
| | DVSHEDPEVKFNWYVDGVEVHNAKTKPREEQYNSTYRVVSV | |
| | LTVLHQDWLNGKEYKCKVSNKALPAPIEKTISKAKGQPREPQV | |
| | YTLPPCRDELTKNQVSLWCLVKGFYPSDIAVEWESNGQPENNY | |
| | KTTPPVLDSDGSFFLYSKLTVDKSRWQQGNVFSCSVMHEALH | |
| | NHYTQKSLSLSP | |
| 446 | DKTHTCPPCPAPELLGGPSVFLFPPKPKDTLMRSRTPEVTCVVV | Hole Fc |
| | DVSHEDPEVKFNWYVDGVEVHNAKTKPREEQYNSTYRVVSV | |
| | LTVLHQDWLNGKEYKCKVSNKALPAPIEKTISKAKGQPREPQV | |
| | CTLPPSRDELTKNQVSLSCAVKGFYPSDIAVEWESNGQPENNY | |
| | KTTPPVLDSDGSFFLVSKLTVDKSRWQQGNVFSCSVMHEALH | |
| | NHYTQKSLSLSP | |
| 447 | DKTHTCPPCPAPGGPSVFLFPPKPKDTLMISRTPEVTCVVVDVS | Knob Fc |
| | HEDPEVKFNWYVDGVEVHNAKTKPREEQYNSTYRVVSVLTVL | |
| | HQDWLNGKEYKCKVSNKALPAPIEKTISKAKGQPREPQVYTLP | |
| | PCRDELTKNQVSLWCLVKGFYPSDIAVEWESNGQPENNYKTTP | |
| | PVLDSDGSFFLYSKLTVDKSRWQQGNVFSCSVMHEALHNHYT | |
| | QKSLSLSP | |
| 448 | DKTHTCPPCPAPGGPSVFLFPPKPKDTLMRSRTPEVTCVVVDVS | Hole Fc |
| | HEDPEVKFNWYVDGVEVHNAKTKPREEQYNSTYRVVSVLTVL | |
| | HQDWLNGKEYKCKVSNKALPAPIEKTISKAKGQPREPQVCTLP | |
| | PSRDELTKNQVSLSCAVKGFYPSDIAVEWESNGQPENNYKTTP | |
| | PVLDSDGSFFLVSKLTVDKSRWQQGNVFSCSVMHEALHNHYT | |
| | QKSLSLSP | |
| 449 | DKTHTCPPCPAPELLGGPSVFLFPPKPKDTLMISRTPEVTCVVV | Hole Fc |
| | DVSHEDPEVKFNWYVDGVEVHNAKTKPREEQYNSTYRVVSV | |
| | LTVLHQDWLNGKEYKCKVSNKALPAPIEKTISKAKGQPREPQV | |
| | CTLPPSRDELTKNQVSLSCAVKGFYPSDIAVEWESNGQPENNY | |
| | KTTPPVLDSDGSFFLVSKLTVDKSRWQQGNVFSCSVMHEALH | |
| | NRYTQKSLSLSP | |
| 450 | DKTHTCPPCPAPGGPSVFLFPPKPKDTLMISRTPEVTCVVVDVS | Hole Fc |
| | HEDPEVKFNWYVDGVEVHNAKTKPREEQYNSTYRVVSVLTVL | |
| | HQDWLNGKEYKCKVSNKALPAPIEKTISKAKGQPREPQVCTLP | |
| | PSRDELTKNQVSLSCAVKGFYPSDIAVEWESNGQPENNYKTTP | |
| | PVLDSDGSFFLVSKLTVDKSRWQQGNVFSCSVMHEALHNRYT | |
| | QKSLSLSP | |
| 451 | DKTHTCPPCPAPELLGGPSVFLFPPKPKDTLYISRTPEVTCVVVD | Knob Fc |
| | VSHEDPEVKFNWYVDGVEVHNAKTKPREEQYNSTYRVVSVLT | |
| | VLHQDWLNGKEYKCKVSNKALPAPIEKTISKAKGQPREPQVYT | |
| | LPPCRDELTKNQVSLWCLVKGFYPSDIAVEWESNGQPENNYKT | |
| | TPPVLDSDGSFFLYSKLTVDKSRWQQGNVFSCSVVHEALHNH | |
| | YTQKSLSLSP | |
| 452 | DKTHTCPPCPAPGGPSVFLFPPKPKDTLYISRTPEVTCVVVDVS | Knob Fc |
| | HEDPEVKFNWYVDGVEVHNAKTKPREEQYNSTYRVVSVLTVL | |
| | HQDWLNGKEYKCKVSNKALPAPIEKTISKAKGQPREPQVYTLP | |
| | PCRDELTKNQVSLWCLVKGFYPSDIAVEWESNGQPENNYKTTP | |
| | PVLDSDGSFFLYSKLTVDKSRWQQGNVFSCSVVHEALHNHYT | |
| | QKSLSLSP | |
| 453 | DKTHTCPPCPAPELLGGPSVFLFPPKPKDTLYISRTPEVTCVVVD | Hole Fc |
| | VSHEDPEVKFNWYVDGVEVHNAKTKPREEQYNSTYRVVSVLT | |
| | VLHQDWLNGKEYKCKVSNKALPAPIEKTISKAKGQPREPQVCT | |
| | LPPSRDELTKNQVSLSCAVKGFYPSDIAVEWESNGQPENNYKT | |
| | TPPVLDSDGSFFLVSKLTVDKSRWQQGNVFSCSVVHEALHNRY | |
| | TQKSLSLSP | |
| 454 | DKTHTCPPCPAPGGPSVFLFPPKPKDTLYISRTPEVTCVVVDVS | Hole Fc |
| | HEDPEVKFNWYVDGVEVHNAKTKPREEQYNSTYRVVSVLTVL | |
| | HQDWLNGKEYKCKVSNKALPAPIEKTISKAKGQPREPQVCTLP | |
| | PSRDELTKNQVSLSCAVKGFYPSDIAVEWESNGQPENNYKTTP | |
| | PVLDSDGSFFLVSKLTVDKSRWQQGNVFSCSVVHEALHNRYT | |
| | QKSLSLSP | |
| 455 | EVQLVESGGGLVQPGGSLRLSCAASGFTFSSFGMHWVRQAPG | B7H3-LC |
| | KGLEWVAYISSDSSAIYYADTVKGRFTISRDNAKNSLYLQMNS | |
| | LRDEDTAVYYCGRGRENIYYGSRLDYWGQGTTVTVSSASTKG | |
| | PSVFPLAPSSKSTSGGTAALGCLVKDYFPEPVTVSWNSGALTSG | |
| | VHTFPAVLQSSGLYSLSSVVTVPSSSLGTQTYICNVNHKPSNTK | |
| | VDKKVEPKSC | |
| 456 | DIQLTQSPSFLSASVGDRVTITCKASQNVDTNVAWYQQKPGKA | B7H3-Fd |
| | PKALIYSASYRYSGVPSRFSGSGSGTDFTLTISSLQPEDFATYYC | |
| | QQYNNYPFTFGQGTKLEIKRTVAAPSVFIFPPSDEQLKSGTASV | |
| | VCLLNNFYPREAKVQWKVDNALQSGNSQESVTEQDSKDSTYS | |
| | LSSTLTLSKADYEKHKVYACEVTHQGLSSPVTKSFNRGEC | |
| 457 | DKTHTCPPCPAPPVAGPSVFLFPPKPKDTLMISRTPEVTCVVVD | Fc-Het-1 |
| | VKHEDPEVKFNWYVDGVEVHNAKTKPREEEYNSTYRVVSVLT | |
| | VLHQDWLNGKEYKCKVSNKALPAPIEKTISKAKGQPREPQVYT | |
| | LPPSREEMTKNQVSLTCDVSGFYPSDIAVEWESDGQPENNYKT | |
| | TPPVLDSDGSFFLYSKLTVDKSRWEQGDVFSCSVMHEALHNH | |
| | YTQKSLSLSPGK | |
| 458 | DKTHTCPPCPAPPVAGPSVFLFPPKPKDTLMISRTPEVTCVVVD | Fc-Het-2 |
| | VKHEDPEVKFNWYVDGVEVHNAKTKPREEQYNSTYRVVSVL | |
| | TVLHQDWLNGKEYKCKVSNKALPAPIEKTISKAKGQPREPQVY | |
| | TLPPSREQMTKNQVKLTCLVKGFYPSDIAVEWESNGQPENNYK | |
| | TTPPVLDSDGSFFLYSKLTVDKSRWQQGNVFSCSVMHEALHN | |
| | HYTQKSLSLSPGK | |
| 459 | QAVVTQEPSLTVSPGGTVTLTCGSSTGAVTTSNYANWVQQKP | VL21 |
| | GKSPRGLIGGTNKRAPGVPARFSGSLLGGKAALTISGAQPEDEA | |
| | DYYCALWYSNHWVFGCGTKLTVL | |
| 460 | EVQLVESGGGLVQPGGSLRLSCAASGFTFSTYAMNWVRQAPG | VH32 |
| | KGLEWVGRIRSKYNNYATYYADSVKGRFTISRDDSKNTLYLQ | |
| | MNSLRAEDTAVYYCVRHGNFGDSYVSWFAYWGQGTLVTVSS | |
| 461 | QAVVTQEPSLTVSPGGTVTLTCGSSTGAVTTSNYANWVQQKP | VL20 |
| | GKSPRGLIGGTNKRAPGVPARFSGSLLGGKAALTISGAQPEDEA | |
| | DYYCALWYSNHWVFGGGTKLTVL | |
| 462 | EVQLVESGGGLVQPGGSLRLSCAASGFTFSTYAMNWVRQAPG | VH34 |
| | KCLEWVARIRSKYNNYATYYADTVKGRFTISRDDAKNTLYLQ | |
| | MSSLRAEDTAVYYCVRHGNFGDSYVSWFAYWGQGTLVTV | |
| 463 | DKTHTCPPCPAPELLGGPSVFLFPPKPKDTLMISRTPEVTCVVV | IgG1 Knob |
| | DVSHEDPEVKFNWYVDGVEVHNAKTKPREEQYNSTYRVVSV | |
| | LTVLHQDWLNGKEYKCKVSNKALPAPIEKTISKAKGQPREPQV | |
| | YTLPPCRDELTKNQVSLWCLVKGFYPSDIAVEWESNGQPENNY | |
| | KTTPPVLDSDGSFFLYSKLTVDKSRWQQGNVFSCSVMHEALH | |
| | NHYTQKSLSLSP | |
| 464 | DKTHTCPPCPAPELLGGPSVFLFPPKPKDTLMRSRTPEVTCVVV | IgG1 Knob |
| | DVSHEDPEVKFNWYVDGVEVHNAKTKPREEQYNSTYRVVSV | |
| | LTVLHQDWLNGKEYKCKVSNKALPAPIEKTISKAKGQPREPQV | |
| | CTLPPSRDELTKNQVSLSCAVKGFYPSDIAVEWESNGQPENNY | |
| | KTTPPVLDSDGSFFLVSKLTVDKSRWQQGNVFSCSVMHEALH | |
| | NHYTQKSLSLSP | |
| 465 | GGGGSGGGGSGGGGS | linker |
| 466 | EVQLVESGGGEVQPGGSLRLSCAASGFTFSSYHMSWFRQAPGK | hz58E05v55 |
| | QRELVATSHHGGTTNYAGSVKGRFTISRDNAKNTVYLQMNTL | |
| | RAEDTAVYYCKADHGYQGRGYWGQGTLVTVKP | |
| 467 | EVQLVESGGGEVQPGGSLRLSCAASGFSFSSNVMMWVRQAPG | hz1A5v51 |
| | KGLEWVSTIYSSGTGTFYAESVKGRFTISRDNAKNTLYLQMSS | |
| | LRPEDTAVYYCATSGPVRGWGPRSQGTLVTVKP | |
| 468 | GFSFSINAMG | 41BB CDR1 |
| 469 | AIESGRNTV | 4IBB CDR2 |
| 470 | LKGNRVVSPSVAY | 4IBB CDR3 |
| 471 | GFTFNTYAMN | anti-CD3 VH |
| | | CDR1 |
| 472 | RIRSKYNNYATY | anti-CD3 VH |
| | | CDR2 |
| 473 | HGNFGDSYVSWFAY | CD3-VH7, VH33 |
| | | CDR3 |
| 474 | ALWYSNHWV | CD3-VL2, VL21 |
| | | CDR3 |
| 475 | VLWYSNRWV | CD3-VL8 CDR3 |
| 476 | GFTFSTYAMN | CD3 VH33 CDR1 |
| 477 | RIRSKYNNYATY | CD3 VH33 CDR1 |
| 478 | GSSTGAVTTSNYAN | CD3 VL21 CDR1 |
| 479 | GTNKRAP | CD3 VL21 CDR2 |
| 480 | EVQLVESGGGLVQPGGSLRLSCAASGFTFSTYAMNWVRQAPG | CD3-VH33 |
| | KCLEWVGRIRSKYNNYATYYADSVKGRFTISRDDSKNTLYLQ | |
| | MNSLRAEDTAVYYCVRHGNFGDSYVSWFAYWGQGTLVTVSS | |
| 481 | EVQLVESGGGEVQPGGSLRLSCAASGFSFSINAMGWYRQAPG | 4IBB sdAb |
| | KRREFVAAIESGRNTVYAESVKGRFTISRDNAKNTVYLQMSSL | |
| | RAEDTAVYYCGLLKGNRVVSPSVAYWGQGTLVTVKP | |
| 482 | IEPDP | Linker |
| 483 | RWGSPDYYHDDVDY | CDRH3 (57B10) |
| 484 | GEPIRVGEKSGYDY | CDRH3 (58B06) |
| 485 | GPRDYFSDLEVDFGS | CDRH3 (57B08) |
| 486 | GLPIRVGVPGGYDY | CDRH3 (58A08) |
| 487 | ASFAYLSTYTHHYDY | CDRH3 (57D1) |
| 488 | SRSAISRKATDFGS | CDRH3 (1H5, |
| | | hz1H5 v1-v4) |
| 489 | EVQLVESGGGEVQPGGSLRLSCAASGFSFSSNVMMWVRQAPG | hz1A5v52 |
| | KGLEWVSTIYSSGTGTYYAESVKGRFTISRDNAKNTLYLQMSS | |
| | LRPEDTAVYYCATSGPVRGWGPRSQGTLVTVKP | |
| 490 | EVQLVESGGGEVQPGGSLRLSCAASGFSFGSNVMMWVRQAPG | hz1A5v53 |
| | KGLEWVSTIYSSGTGTFYAESVKGRFTISRDNAKNTLYLQMSS | |
| | LRPEDTAVYYCATSGPVRGWGPRSQGTLVTVKP | |
| 491 | GGS(GGS)n, where n = 0 to 10 | linker |
| 492 | EVQLVESGGGEVQPGGSLRLSCAASGFSFGSNVMMWVRQAPG | hz1A5v1 |
| | KGPEWVSTIYSSGTGTFYAESVKGRFTISRDNAKNTLYLQMSSL | |
| | RAEDTAVYYCATSGPVRGWGPRSQGTLVTVKP | |
| 493 | EVQLVESGGGEVQPGGSLRLSCAASGFSFGSNVMMWVRQAPG | hz1A5v2 |
| | KGPEWVSTIYSSGTGTFYAESVKGRFTISRNNAKNTLYLQMSSL | |
| | RAEDTAVYYCATSGPVRGWGPRSQGTLVTVKP | |
| 494 | EVQLVESGGGEVQPGGSLRLSCAASGFSFGSNVMMWVRQAPG | hz1A5v3 |
| | KGPEWVSTIYSSGTGTFYAESVKGRFTISRNNAKNTLYLQMSSL | |
| | RAEDTAVYYCATSGPVRGWGPRGQGTLVTVKP | |
| 495 | EVQLVESGGGEVQPGGSLRLSCAASGFSFGSNVMMWVRQAPG | hz1A5v7 |
| | KGPEWVSTIYSSGTGTFYAESVKGRFTISRNNAKNTLYLQMSSL | |
| | KPDDTAVYYCATSGPVRGWGPRSQGTLVTVKP | |
| 496 | EVQLVESGGGLVQAGDSLRLSCAASGFSFGSNVMMWVRQAP | hz1A5v8 |
| | GKGPEWVSTIYSSGTGTFYAESVKGRFTISRNNAKNTLYLQMS | |
| | SLRAEDTAVYYCATSGPVRGWGPRSQGTLVTVKP | |
| 497 | EVQLVESGGGEVQPGGSLRLSCAASGFSFGSNVMMWVRQAPG | hz1A5v9 |
| | KGPEWVSTIYSRGTGTFYAESVKGRFTISRNNAKNTLYLQMSS | |
| | LRAEDTAVYYCATSGPVRGWGPRSQGTLVTVKP | |
| 498 | EVQLVESGGGEVQPGGSLRLSCAASERTFSTYTMGWFRQAPG | hz57B04v3 |
| | KEREFVSVVNWSGGSKYYAESVKGRFTISRDNAKNTVYLQMN | |
| | SLRAEDTAVYYCAAGGAYSGPYYDTRQYTYWGQGTLVTVKP | |
| 499 | EVQLVESGGGEVQPGGSLRLSCAASERTFSTYTMGWFRQAPG | hz57B04v4 |
| | KEREFVAVVNWSGGSKYYAESVKGRFTISRDNAKNTVYLQMN | |
| | SLRAEDTAVYYCAAGGAYSGPYYDTRQYTYWGQGTLVTVKP | |
| 500 | EVQLVESGGGEVQPGGSLRLSCAPSERTFSTYTMGWFRQAPGK | hz57B04v8 |
| | EREFVAVVNWSGGSKYYAESVKGRFTISRDNAKNTVYLQMNS | |
| | LRAEDTAVYYCAAGGAYSGPYYDTRQYTYWGQGTLVTVKP | |
| 501 | EVQLVESGGGEVQPGGSLRLSCAASERTFSTYTMGWFRQAPG | hz57B04v9 |
| | KEREFVAVVNWSGGSKYYAESVKGRFTISRDNAKNTVYLHMN | |
| | SLRAEDTAVYYCAAGGAYSGPYYDTRQYTYWGQGTLVTVKP | |
| 502 | EVQLVESGGGEVQPGGSLRLSCAPSERTFSTYTMGWFRQAPGK | hz57B04v23 |
| | EREFVAVVNWSGGSKYYAESVKGRFTISRDNAKNTVYLQMSS | |
| | LRAEDTAVYYCAAGGAYSGPYYDTRQYTYWGQGTLVTVKP | |
| 503 | EVQLVESGGGEVQPGGSLRLSCAPSERTFSTYTMGWFRQAPGK | hz57B04v24 |
| | EREFVAVVNWGGGSKYYAESVKGRFTISRDNAKNTVYLQMSS | |
| | LRAEDTAVYYCAAGGAYSGPYYDTRQYTYWGQGTLVTVKP | |
| 504 | EVQLVESGGGEVQPGGSLRLSCAASGSTFSMYHMSWFRQAPG | hz58E05v1 |
| | KGREPVSTSHHGGTTNYAESVKGRFTISRDNAKNTLYLQMNSL | |
| | RAEDTAVYYCKADHGYNGRGYWGQGTLVTVKP | |
| 505 | EVQLVESGGGEVQPGGSLRLSCAASGSTFSMYHMSWFRQAPG | hz58E05v2 |
| | KQREPVSTSHHGGTTNYAESVKGRFTISRDNAKNTLYLQMNSL | |
| | RAEDTAVYYCKADHGYNGRGYWGQGTLVTVKP | |
| 506 | EVQLVESGGGEVQPGGSLRLSCAASGSTFSMYHMSWFRQAPG | hz58E05v3 |
| | KQREPVSTSHHGGTTNYAESVKGRFTISRDNAKNTVYLQMNSL | |
| | RAEDTAVYYCKADHGYNGRGYWGQGTLVTVKP | |
| 507 | EVQLVESGGGEVQPGGSLRLSCAASGSTFSMYHMSWFRQAPG | hz58E05v4 |
| | KQREPVATSHHGGTTNYAESVKGRFTISRDNAKNTVYLQMNS | |
| | LRAEDTAVYYCKADHGYNGRGYWGQGTLVTVKP | |
| 508 | EVQLVESGGGEVQPGGSLRLSCAASGSTFSMYHMSWFRQAPG | hz58E05v5 |
| | KQREPVATSHHGGTTNYAESVKGRFTISRDNAKNTVYLQMNS | |
| | LRAEDTAVYYCKADHGYQGRGYWGQGTLVTVKP | |
| 509 | EVQLVESGGGEVQPGGSLRLSCAASGSTFSMYHMSWFRQAPG | hz58E05v6 |
| | KQREPVATSHHGGTTNYAESVKGRFTISRDNAKNTVYLQMNS | |
| | LRAEDTAVYYCKADHGYNARGYWGQGTLVTVKP | |
| 510 | EVQLVESGGGEVQPGGSLRLSCAASGSTFSMYHMSWFRQAPG | hz58E05v7 |
| | KQREPVATSHHGGTTNYAESVKGRFTISRDNAKNTVYLQMNS | |
| | LRAEDTAVYYCKADHGYNTRGYWGQGTLVTVKP | |
| 511 | EVQLVESGGGEVQPGGSLRLSCAASGSTFSMYHMSWFRQAPG | hz58E05v8 |
| | KQREPVATSHHGGTTNYAGSVKGRFTISRDNAKNTVYLQMNS | |
| | LRAEDTAVYYCKADHGYNGRGYWGQGTLVTVKP | |
| 512 | EVQLVESGGGEVQPGGSLRLSCAASGSTFSMYHMSWFRQAPG | hz58E05v9 |
| | KQREPVATSHHGGTTNYAESVKGRFTISRDNAKNTLYLQMNS | |
| | LRAEDTAVYYCKADHGYQGRGYWGQGTLVTVKP | |
| 513 | EVQLVESGGGEVQPGGSLRLSCAASGSTFSMYHMSWFRQAPG | hz58E05v10 |
| | KQREPVATSHHGGTTNYAESVKGRFTISRDNAKNTLYLQMNS | |
| | LRAEDTAVYYCKADHGYNARGYWGQGTLVTVKP | |
| 514 | EVQLVESGGGEVQPGGSLRLSCAASGSTFSMYHMSWFRQAPG | hz58E05v11 |
| | KQREPVATSHHGGTTNYAESVKGRFTISRDNAKNTLYLQMNS | |
| | LRAEDTAVYYCKADHGYNTRGYWGQGTLVTVKP | |
| 515 | EVQLVESGGGEVQPGGSLRLSCAASGGTFSSYAMGWFRQAPG | h57B06v5 |
| | KEREFVAAISSEGGSTYYADNMEGRFTISRDNAKNTVYLQMSS | |
| | LRAEDTAVYYCAVKGVGWPQEQASYDYWGQGTLVTVKP | |
| 516 | EVQLVESGGGEVQPGGSLRLSCAASGGTFSSYAMGWFRQAPG | h57B06v6 |
| | KEREFVAAISSEGGSTYYAESMEGRFTISRDNAKNTVYLQMSS | |
| | LRAEDTAVYYCAVKGVGWPQEQASYDYWGQGTLVTVKP | |
| 517 | QVQLVQDGDSLRLSCAASGGTFSSYAMGWFRQAPGKEREFVA | h57B06v7 |
| | AISSEGGSTYYADNMEGRFTISRDNAKNTVYLQMSSLRAEDTA | |
| | VYYCAVKGVGWPQEQASYDYWGQGTLVTVKP | |
| 518 | EVQLVESGGGEVQPGGSLRLSCAASGGTFSSYAMGWFRQAPG | h57B06v8 |
| | QEREFVAAISSEGGSTYYAESVKGRFTISRDNAKNTVYLQMSSL | |
| | RAEDTAVYYCAVKGVGWPQEQASYDYWGQGTLVTVKP | |
| 519 | QVQLVQSGGGLVQPGGSLRLSCVASGSMTGANTMGWYRQAP | 18H10 |
| | GKQRDLVALIGNYHYADSVKGRFTISRENAKNTVILQMNSLNP | |
| | EDTAVYYCYLYTDNLGTSWGQGTLVTVKP | |
| 520 | EVQLVESGGGEVQPGGSLRLSCAASGSMTGANTMGWYRQAP | hz18H10v1 |
| | GKGRDLVSLIGNYVTHYAESVKGRFTISRDNAKNTLYLQMSSL | |
| | RAEDTAVYYCYLYTDNLGTSWGQGTLVTVKP | |
| 521 | EVQLVESGGGEVQPGGSLRLSCAASGSMTGANTMGWYRQAP | hz18H10v2 |
| | GKQRDLVSLIGNYVTHYAESVKGRFTISRDNAKNTLYLQMSSL | |
| | RAEDTAVYYCYLYTDNLGTSWGQGTLVTVKP | |
| 522 | EVQLVESGGGEVQPGGSLRLSCAASGSMTGANTMGWYRQAP | hz18H10v3 |
| | GKQRDLVSLIGNYVTHYAESVKGRFTISRDNAKNTVYLQMSSL | |
| | RAEDTAVYYCYLYTDNLGTSWGQGTLVTVKP | |
| 523 | EVQLVESGGGEVQPGGSLRLSCAASGSMTGANTMGWYRQAP | hz18H10v4 |
| | GKQRDLVALIGNYVTHYAESVKGRFTISRDNAKNTVYLQMSS | |
| | LRAEDTAVYYCYLYTDNLGTSWGQGTLVTVKP | |
| 524 | EVQLVESGGGEVQPGGSLRLSCAASGSMTGANTMGWYRQAP | hz18H10v5 |
| | GKQRDLVALIGNYVTHYAESVKGRFTISRENAKNTVYLQMSSL | |
| | RAEDTAVYYCYLYTDNLGTSWGQGTLVTVKP | |
| 525 | EVQLVESGGGEVQPGGSLRLSCAASGSVTGANTMGWYRQAPG | hz18H10v6 |
| | KQRDLVALIGNYVTHYAESVKGRFTISRDNAKNTVYLQMSSLR | |
| | AEDTAVYYCYLYTDNLGTSWGQGTLVTVKP | |
| 526 | EVQLVESGGGEVQPGGSLRLSCAASGSITGANTMGWYRQAPG | hz18H10v7 |
| | KQRDLVALIGNYVTHYAESVKGRFTISRDNAKNTVYLQMSSLR | |
| | AEDTAVYYCYLYTDNLGTSWGQGTLVTVKP | |
| 527 | EVQLVESGGGEVQPGGSLRLSCAASGSVTGANTMGWYRQAPG | hz18H10v8 |
| | KQRDLVSLIGNYVTHYAESVKGRFTISRDNAKNTLYLQMSSLR | |
| | AEDTAVYYCYLYTDNLGTSWGQGTLVTVKP | |
| 528 | EVQLVESGGGEVQPGGSLRLSCAASGSVTGANTMGWYRQAPG | hz18H10v9 |
| | KQRDLVSLIGNYVTHYAESVKGRFTISRDNAKNTVYLQMSSLR | |
| | AEDTAVYYCYLYTDNLGTSWGQGTLVTVKP | |
| 529 | EVQLVESGGGEVQPGGSLRLSCAASGSMTGANTMGWYRQAP | hz18H10v10 |
| | GKQRDLVSLIGNYVTHYAESVKGRFTISRENAKNTVYLQMSSL | |
| | RAEDTAVYYCYLYTDNLGTSWGQGTLVTVKP | |
| 530 | EVQLVESGGGEVQPGGSLRLSCAASGSVTGANTMGWYRQAPG | hz18H10v11 |
| | KQRDLVSLIGNYVTHYAESVKGRFTISRENAKNTVYLQMSSLR | |
| | AEDTAVYYCYLYTDNLGTSWGQGTLVTVKP | |
| 531 | EVQLVESGGGEVQPGGSLRLSCAASGSVTGANTMGWYRQAPG | hz18H10v12 |
| | KQRDLVALIGNYVTHYAESVKGRFTISRENAKNTVYLQMSSLR | |
| | AEDTAVYYCYLYTDNLGTSWGQGTLVTVKP | |
| 532 | EVQLVESGGGEVQPGGSLRLSCAASGSMTGANTMGWYRQAP | hz18H10v13 |
| | GKQRELVALIGNYVTHYAESVKGRFTISRENAKNTVYLQMSSL | |
| | RAEDTAVYYCYLYTDNLGTSWGQGTLVTVKP | |
| 533 | EVQLVESGGGEVQPGGSLRLSCAASGSVTGANTMGWYRQAPG | hz18H10v14 |
| | KQRDLVALIGNYVTHYAESVKGRFTISRDNAKNTLYLQMSSLR | |
| | AEDTAVYYCYLYTDNLGTSWGQGTLVTVKP | |
| 534 | EVQLVESGGGEVQPGGSLRLSCAASGSITGANTMGWYRQAPG | hz18H10v15 |
| | KQRDLVALIGNYVTHYAESVKGRFTISRDNAKNTLYLQMSSLR | |
| | AEDTAVYYCYLYTDNLGTSWGQGTLVTVKP | |
| 535 | EVQLVESGGGEVQPGGSLRLSCAASGSITGANTMGWYRQAPG | hz18H10v16 |
| | KQRDLVALIGNYVTHYAESVKGRFTISRENAKNTVYLQMSSLR | |
| | AEDTAVYYCYLYTDNLGTSWGQGTLVTVKP | |
| 536 | EVQLVESGGGEVQPGGSLRLSCAASGSITGANTMGWYRQAPG | hz18H10v17 |
| | KQRDLVALIGNYVTHYAESVKGRFTISRDNAKNTVYLQMNSL | |
| | RAEDTAVYYCYLYTDNLGTSWGQGTLVTVKP | |
| 537 | EVQLVESGGGLVQPGRSLRLSCAASGFTFDDYAMHWVRQAPG | Anti-CD3 VH |
| | KGLEWVSGISWNSGSIGYADSVKGFTISRDNAKNSLYLQMNSL | 312557 |
| | RAEDTALYYCAKDSRGYGDYRLGGAYWGQGTLVTVSS | |
| 538 | EVQLVESGGGLVQPGRSLRLSCAASGFTFDDYAMHWVRQAPG | Anti-CD3 VH |
| | KCLEWVSGISWNSGSIGYADSVKGFTISRDNAKNSLYLQMNSL | 312557 G44C |
| | RAEDTALYYCAKDSRGYGDYRLGGAYWGQGTLVTVSS | |
| 539 | EIVMTQSPATLSVSPGERATLSCRASQSVSSNLAWYQQKPGQA | Anti-CD3 VL |
| | PRLLIYGASTRATGIPARFSGSGSGTEFTLTISSLQSEDFAVYYC | 312557 |
| | QQYNNWPWTFGQGTKVEIK | |
| 540 | EIVMTQSPATLSVSPGERATLSCRASQSVSSNLAWYQQKPGQA | Anti-CD3 VL |
| | PRLLIYGASTRATGIPARFSGSGSGTEFTLTISSLQSEDFAVYYC | 312557 Q100C |
| | QQYNNWPWTFGCGTKVEIK | |
| 541 | EVQLVESGGGLVQPGRSLRLSCVASGFTFDDYSMHWVRQAPG | CD3-VH-G |
| | KGLEWVSGISWNSGSKDYADSVKGRFTISRDNAKNSLYLQMN | |
| | SLRAEDTALYYCAKYGSGYGKFYHYGLDVWGQGTTVTVSS | |
| 542 | EVQLVESGGGLVQPGRSLRLSCVASGFTFDDYSMHWVRQAPG | CD3-VH-G |
| | KCLEWVSGISWNSGSKDYADSVKGRFTISRDNAKNSLYLQMN | |
| | SLRAEDTALYYCAKYGSGYGKFYHYGLDVWGQGTTVTVSS | |
| 543 | DIQMTQSPSSLSASVGDRVTITCRASQSISSYLNWYQQKPGKAP | V_{K1}-39Jk5 |
| | KLLIYAASSLQSGVPSRFSGSGSGTDFTLTISSLQPEDFATYYCQ | |
| | QSYSTPPITFGQGTRLEIK | |
| 544 | DIQMTQSPSSLSASVGDRVTITCRASQSISSYLNWYQQKPGKAP | V_{K1}-39Jk5 Q100C |
| | KLLIYAASSLQSGVPSRFSGSGSGTDFTLTISSLQPEDFATYYCQ | |
| | QSYSTPPITFGCGTRLEIK | |
| 545 | (ADAAP)n | linker |
| | n = 2-20 | |
| 546 | (ADAAP)n-G | linker |
| | n = 2-20 | |
| 547 | (GEPQG)n | linker |
| | n = 2-20 | |
| 548 | (GEPQG)n-G | linker |
| | n = 2-20 | |
| 549 | (AGGEP)n | linker |
| | n = 2-20 | |
| 550 | (AGGEP)n-G | linker |
| | n = 2-20 | |
| 551 | (AGSEP)n | linker |
| | n = 2-20 | |
| 552 | (AGSEP)n-G | linker |
| | n = 2-20 | |
| 553 | (GGGEQ)n | linker |
| | n = 2-20 | |
| 554 | (GGGEQ)n-G | linker |
| | n = 2-20 | |
| 555 | ADAAPADAAPG | linker |
| 556 | GEPQGGEPQGG | linker |
| 557 | AGGEPAGGEPG | linker |
| 558 | AGSEPAGSEPG | linker |
| 559 | GGGEQGGGEQG | linker |

1. A B7H3-binding polypeptide construct, comprising at least one heavy chain only variable domain (B7H3 VHH domain) that specifically binds B7H3 and one or more additional binding domain that binds to a target other than B7H3.

2. (canceled)

3. A B7H3-binding polypeptide construct, comprising at least one heavy chain only variable domain (B7H3 VHH domain) comprising a complementarity determining region 1 (CDR1) comprising an amino acid sequence selected from the group consisting of SEQ ID NO: 115, 116, 117, 118, 119, 120, 121, 122, 123, 124, 125, 126, 127, 128, 129, 130, 131, 132, 133, 134, 135, 136, 137, 138, 139, 140, 141, 142, 143, 144 and 145; a complementarity determining region 2 (CDR2) comprising an amino acid sequence selected from the group consisting of SEQ ID NO: 146, 147, 148, 149, 150, 151, 152, 153, 154, 155, 156, 157, 158, 159, 160, 161, 162, 163, 164, 165, 166 and 167; and a complementarity determining region 3 (CDR3) comprising an amino acid sequence selected from the group consisting of SEQ ID NO: 168, 169, 170, 171, 172, 173, 174, 175, 176, 177, 178, 179, 180, 181, 182, 183, 184, 185, 186, 187, 188, 189, and 483-488.

4. The B7H3-binding polypeptide construct of claim 3, comprising one or more additional binding domain(s) that binds to a target other than B7H3.

5. The B7H3-binding polypeptide construct of claim 3, wherein the at least one B7H3 VHH domain is humanized.

6. The B7H3-binding polypeptide construct of claim 4, wherein the one or more additional binding domain(s) binds to an activating receptor on an immune cell.

7. (canceled)

8. The B7H3-binding polypeptide construct of claim 6, wherein the activating receptor is CD3.

9. The B7H3-binding polypeptide construct of claim 3, wherein the at least one B7H3 VHH domain is conjugated to a radioactive ligand.

10-20. (canceled)

21. The B7H3-binding polypeptide construct of claim 3, wherein the polypeptide construct comprises an immunoglobulin Fc region.

22. (canceled)

23. The B7H3-binding polypeptide construct of claim 3 that is a dimer.

24-27. (canceled)

28. The B7H3-binding polypeptide construct of claim 21, wherein the Fc region is a heterodimeric Fc region.

29-33. (canceled)

34. The B7H3-binding polypeptide construct of claim 3, wherein the at least one B7H3 VHH domain comprises (i) the sequence set forth in SEQ ID NO:1, (ii) a humanized variant of SEQ ID NO:1, or (iii) a sequence of amino acids that exhibits at least 85%, 86%, 87%, 88%, 89%, 90%, 91%, 92%, 93%, 94%, 95%, 96%, 97%, 98%, or 99% sequence identity to SEQ ID NO:1, and binds B7H3.

35. The B7H3-binding polypeptide construct of claim 3, wherein:
(a) the at least one B7H3 VHH domain comprises a CDR1 comprising an amino acid sequence selected from the group consisting of SEQ ID NO: 115, 116, 117, 118, 119, 120 and 121; a CDR2 comprising an amino acid sequence selected from the group consisting of SEQ ID NO: 146, 147, 148, 149, 150 and 151; and a CDR3 comprising an amino acid sequence selected from the group consisting of SEQ ID NO: 168 and 169; and/or
(b) the at least one B7H3 VHH domain comprises a CDR1, CDR2 and CDR3 set forth in SEQ ID NOS: 115, 146 and 168, respectively; SEQ ID NOS: 115, 147 and 168, respectively; SEQ ID NOS: 115, 148 and 168, respectively; SEQ ID NOS: 115, 149 and 168, respectively; SEQ ID NOS: 115, 150 and 168, respectively; SEQ ID NOS: 116, 146 and 168, respectively; SEQ ID NOS: 117, 146 and 168, respectively; SEQ ID NOS: 118, 146 and 168, respectively; SEQ ID NOS: 115, 146 and 169, respectively; SEQ ID NOS: 119, 146 and 168, respectively; SEQ ID NOS: 120, 146 and 168, respectively; SEQ ID NOS: 115, 151 and 168, respectively; SEQ ID NOS: 116, 147 and 168, respectively; SEQ ID NOS: 118, 147 and 168, respectively; SEQ ID NOS: 119, 147 and 168, respectively; SEQ ID NOS: 116, 151 and 168, respectively; SEQ ID NOS: 115, 146 and 168, respectively; SEQ ID NOS: 121, 147 and 168, respectively; SEQ ID NOS: 115, 146 and 168, respectively; SEQ ID NOs: 119, 149 and 168, respectively; or SEQ ID NOS: 122, 151 and 168, respectively.

36. (canceled)

37. The B7H3-binding polypeptide construct of claim 3, wherein the at least one B7H3 VHH domain comprises the sequence of amino acids set forth in any one of SEQ ID NOs:8-34, 467, 489-490, and 492-497 or a sequence of amino acids that exhibits at least 85%, 86%, 87%, 88%, 89%, 90%, 91%, 92%, 93%, 94%, 95%, 96%, 97%, 98%, or 99% sequence identity to any one of SEQ ID NO: 8-34, 467, 489-490, and 492-497, and binds B7H3.

38. (canceled)

39. The B7H3-binding polypeptide construct of claim 3, wherein the at least one B7H3 VHH domain comprises (i) the sequence set forth in SEQ ID NO:35, (ii) a humanized variant of SEQ ID NO:35, or (iii) a sequence of amino acids that exhibits at least 85%, 86%, 87%, 88%, 89%, 90%, 91%, 92%, 93%, 94%, 95%, 96%, 97%, 98%, or 99% sequence identity to SEQ ID NO:35, and binds B7H3.

40. The B7H3-binding polypeptide of claim 3, wherein:
(a) the at least one B7H3 VHH domain comprises a CDR1 comprising an amino acid sequence set forth in SEQ ID NO: 123; a CDR2 comprising an amino acid sequence selected from the group consisting of SEQ ID NO: 152 and 153; and a CDR3 comprising an amino acid sequence selected from the group consisting of SEQ ID NO: 170 and 171; and/or
(b) the at least one B7H3 VHH domain comprises a CDR1, CDR2 and CDR3 set forth in SEQ ID NOS: 123, 152 and 170, respectively; SEQ ID NOS: 123, 152 and 171, respectively; SEQ ID NOS: 123, 153 and 170, respectively; or SEQ ID NOS: 123, 153 and 171, respectively.

41. (canceled)

42. The B7H3-binding polypeptide construct of claim 3, wherein the at least one B7H3 VHH domain comprises the sequence of amino acids set forth in any one of SEQ ID NOs:40, 41, or 498-503 or a sequence of amino acids that exhibits at least 85%, 86%, 87%, 88%, 89%, 90%, 91%, 92%, 93%, 94%, 95%, 96%, 97%, 98%, or 99% sequence identity to any one of SEQ ID NO: 40, 41, or 498-503, and binds B7H3.

43. (canceled)

44. The B7H3-binding polypeptide construct of claim 3, wherein the at least one B7H3 VHH domain comprises (i) the sequence set forth in SEQ ID NO:44 (ii) a humanized variant of SEQ ID NO:44, or (iii) a sequence of amino acids that exhibits at least 85%, 86%, 87%, 88%, 89%, 90%, 91%, 92%, 93%, 94%, 95%, 96%, 97%, 98%, or 99% sequence identity to SEQ ID NO:44, and binds B7H3.

45. The B7H3-binding polypeptide construct of claim 3, wherein:
(a) the at least one B7H3 VHH domain comprises a CDR1 comprising an amino acid sequence selected from the group consisting of SEQ ID NO: 124, 125, 126, 127, 128, 129, 130, 131, 132, or 133; a CDR2 comprising an amino acid sequence set forth in SEQ ID NO: 154; and a CDR3 comprising an amino acid sequence selected from the group consisting of SEQ ID NO: 172, 173, 174, 175, 176, 177, 178, 179, 180, 181, 182 and 183; and/or
(b) the at least one B7H3 VHH domain comprises a CDR1, CDR2 and CDR3 set forth in SEQ ID NOS: 124, 154 and 172, respectively; SEQ ID NOS: 124, 154 and 173, respectively; SEQ ID NOS: 124, 154 and 174, respectively; SEQ ID NOS: 124, 154 and 175, respectively; SEQ ID NOS: 125, 154 and 173, respectively; SEQ ID NOS: 126, 154 and 173, respectively; SEQ ID NOS: 127, 154 and 173, respectively; SEQ ID NOS: 128, 154 and 173, respectively; SEQ ID NOS: 129, 154 and 173, respectively; SEQ ID NOS: 130, 154 and 173, respectively; SEQ ID NOS: 131, 154 and 173, respectively; SEQ ID NOS: 124, 154 and 176, respectively; SEQ ID NOS: 124, 154 and 177, respectively; SEQ ID NOS: 124, 154 and 178, respectively; SEQ ID NOS: 124, 154 and 179, respectively; SEQ ID NOS: 124, 154 and 180, respectively; SEQ ID NOS: 124, 154 and 181, respectively; SEQ ID NOS: 124, 154 and 182, respectively; SEQ ID NOS: 124, 154 and 183, respectively; SEQ ID NOS: 126, 154 and 176, respectively; SEQ ID NOS: 124, 154 and 179, respectively; SEQ ID NOS: 124, 154 and 182, respectively; SEQ ID NOS: 132, 154 and 176, respectively; or SEQ ID NOS: 133, 154 and 173, respectively.

46. (canceled)

47. The B7H3-binding polypeptide construct of claim 3, wherein the at least one B7H3 VHH domain comprises the sequence of amino acids set forth in any one of SEQ ID NOs:56-91, 466, and 504-514 or a sequence of amino acids that exhibits at least 85%, 86%, 87%, 88%, 89%, 90%, 91%, 92%, 93%, 94%, 95%, 96%, 97%, 98%, or 99% sequence identity to any one of SEQ ID NO: 56-91, 466, and 504-514, and binds B7H3.

48. (canceled)

49. The B7H3-binding polypeptide construct of claim 3, wherein the at least one B7H3 VHH domain comprises (i) the sequence set forth in SEQ ID NO:105 (ii) a humanized variant of SEQ ID NO:105, or (iii) a sequence of amino acids that exhibits at least 85%, 86%, 87%, 88%, 89%, 90%, 91%, 92%, 93%, 94%, 95%, 96%, 97%, 98%, or 99% sequence identity to SEQ ID NO:105, and binds B7H3.

50. The B7H3-binding polypeptide construct of claim 3, wherein the at least one B7H3 VHH domain comprises a CDR1 comprising an amino acid sequence set forth in SEQ ID NO: 145; a CDR2 comprising an amino acid sequence set forth in SEQ ID NO: 167; and a CDR3 comprising an amino acid sequence set forth in SEQ ID NO: 488.

51. The B7H3-binding polypeptide construct of claim 3, wherein the at least one B7H3 VHH domain comprises the sequence of amino acids set forth in any one of SEQ ID NOs:106-109 or a sequence of amino acids that exhibits at least 85%, 86%, 87%, 88%, 89%, 90%, 91%, 92%, 93%, 94%, 95%, 96%, 97%, 98%, or 99% sequence identity to any one of SEQ ID NO:106-109, and binds B7H3.

52. (canceled)

53. The B7H3-binding polypeptide construct of claim 3, wherein the at least one B7H3 VHH domain comprises (i) the sequence set forth in SEQ ID NO:110 (ii) a humanized variant of SEQ ID NO:110, or (iii) a sequence of amino acids that exhibits at least 85%, 86%, 87%, 88%, 89%, 90%, 91%, 92%, 93%, 94%, 95%, 96%, 97%, 98%, or 99% sequence identity to SEQ ID NO:110, and binds B7H3.

54. The B7H3-binding polypeptide of claim 3, wherein the at least one B7H3 VHH domain comprises a CDR1 comprising an amino acid sequence set forth in SEQ ID NO: 139; a CDR2 comprising an amino acid sequence set forth in SEQ ID NO: 161; and a CDR3 comprising an amino acid sequence set forth in SEQ ID NO: 189.

55. The B7H3-binding polypeptide construct of claim 3, wherein the at least one B7H3 VHH domain comprises the sequence of amino acids set forth in any one of SEQ ID NOs:515-518 or a sequence of amino acids that exhibits at least 85%, 86%, 87%, 88%, 89%, 90%, 91%, 92%, 93%, 94%, 95%, 96%, 97%, 98%, or 99% sequence identity to any one of SEQ ID NO: 515-518, and binds B7H3.

56-59. (canceled)

60. The B7H3-binding polypeptide construct of claim 3, comprising: (a) a first component comprising a heterodimeric Fc region comprising a first Fc polypeptide and a second Fc polypeptide and (b) a second component comprising an anti-CD3 antibody or antigen-binding fragment comprising a variable heavy chain region (VH) and a variable light chain region (VL), wherein:
the VH and VL that comprise the anti-CD3 antibody or antigen binding fragment are linked to opposite polypeptides of the heterodimeric Fc;
the first and second components are coupled by a linker, wherein the heterodimeric Fc region is positioned amino-terminally to the anti-CD3 antibody or antigen-binding fragment; and
one or both of the first and second components comprises the at least one B7H3 VHH domain.

61-63.(canceled)

64. The B7H3-binding polypeptide construct of claim 60, wherein each of the first and second Fc polypeptides of the heterodimeric Fc region comprises a knob-into-hole modification or comprises a charge mutation to increase electrostatic complementarity of the polypeptides.

65-86. (canceled)

87. The B7H3-binding polypeptide construct of claim 60, wherein the anti-CD3 antibody or antigen-binding fragment is an Fv antibody fragment.

88. The B7H3-binding polypeptide construct of claim 87, wherein the Fv antibody fragment comprises a disulfide stabilized anti-CD3 binding Fv fragment (dsFv).

89. The B7H3-binding polypeptide construct of claim 60, wherein:
(a) the anti-CD3 antibody or antigen-binding fragment comprises a VH CDR1 comprising the amino acid sequence TYAMN (SEQ ID NO: 219); a VH CDR2 comprising the amino acid sequence RIRSKYNNYATYYADSVKD (SEQ ID NO: 220); a VH CDR3 comprising the amino acid sequence HGNFGNSYVSWFAY (SEQ ID NO: 221), a VL CDR1 comprising the amino acid sequence RSSTGAVTTSNYAN (SEQ ID NO: 222); a VL CDR2 comprising the amino acid sequence GTNKRAP (SEQ ID NO: 223); and a VL CDR3 comprising the amino acid sequence ALWYSNLWV (SEQ ID NO: 224);
(b) the anti-CD antibody or antigen-binding fragment comprises a VH CDR1 comprising the amino acid sequence GFTFNTYAMN (SEQ ID NO: 471); a VH CDR2 comprising the amino acid sequence RIRSKYNNYATY (SEQ ID NO: 472); a VH CDR3 comprising the amino acid sequence HGNFGNSYVSWFAY (SEQ ID NO: 221), a VL CDR1 comprising the amino acid sequence RSSTGAVTTSNYAN (SEQ ID NO: 19); a VL CDR2 sequence comprising the amino acid sequence GTNKRAP (SEQ ID NO: 20); and a VL CDR3 comprising the amino acid sequence ALWYSNLWV (SEQ ID NO: 21);
(c) the anti-CD antibody or antigen-binding fragment comprises a VH CDR1 comprising the amino acid sequence GFTFNTYAMN (SEQ ID NO: 471); a VH CDR2 comprising the amino acid sequence RIRSKYNNYATY (SEQ ID NO: 472); a VH CDR3 comprising the amino acid sequence HGNFGNSYVSWFAY (SEQ ID NO: 221), a VL CDR1 comprising the amino acid sequence RSSTGAVTTSNYAN (SEQ ID NO: 222); a VL CDR2 comprising the amino acid sequence GTNKRAP (SEQ ID NO: 223); and a VL CDR3 comprising the amino acid sequence ALWYSNLWV (SEQ ID NO: 224);
(d) the anti-CD antibody or antigen-binding fragment comprises a VH CDR1 comprising the amino acid sequence GFTFNTYAMN (SEQ ID NO: 471); a VH CDR2 comprising the amino acid sequence RIRSKYNNYATY (SEQ ID NO: 472); a VH CDR3 comprising the amino acid sequence HGNFGNSYVSWFAY (SEQ ID NO: 221), a VL CDR1 comprising the amino acid sequence GSSTGAVTTSNYAN (SEQ ID NO: 478); a VL CDR2 comprising the amino acid sequence GTNKRAP (SEQ ID NO: 479); and a VL CDR3 comprising the amino acid sequence ALWYSNHWV (SEQ ID NO: 474);
(e) the anti-CD antibody or antigen-binding fragment comprises a VH CDR1 comprising the amino acid sequence GFTFNTYAMN (SEQ ID NO: 471); a VH CDR2 comprising the amino acid sequence RIRSKYNNYATY (SEQ ID NO: 472); a VH CDR3 comprising the amino acid sequence HGNFGNSYVSWFAY (SEQ ID NO: 221), a VL CDR1 comprising the amino acid sequence GSSTGAVTTSNYAN (SEQ ID NO: 478); a VL CDR2 comprising the amino acid sequence GTNKRAP (SEQ ID NO: 223); and a VL CDR3 comprising the amino acid sequence ALWYSNHWV (SEQ ID NO: 474);
(f) the anti-CD antibody or antigen-binding fragment comprises a VH CDR1 comprising the amino acid sequence GFTFSTYAMN (SEQ ID NO: 476); a VH CDR2 comprising the amino acid sequence RIRSKYNNYATY (SEQ ID NO: 477); a VH CDR3 comprising the amino acid sequence HGNFGDSYVSWFAY (SEQ ID NO: 473), a VL CDR1 comprising the amino acid sequence GSSTGAVTTSNYAN (SEQ ID NO: 478); a VL CDR2 comprising the amino acid sequence GTNKRAP (SEQ ID NO: 223); and a VL CDR3 comprising the amino acid sequence ALWYSNHWV (SEQ ID NO: 474); and/or
(g) a VH having the amino acid sequence of any of SEQ ID NOS: 225-255, 480, 460, or 462 or a sequence that exhibits at least 90%, 91%, 92%, 93%, 94%, 95%, 96%, 97%, 98% or 99% sequence identity to any of SEQ ID NOS: 225-255,460, or 462 and binds CD3; and
a VL having the amino acid sequence of any of SEQ ID NOS: 256-274, 417,459, or 461 or a sequence that exhibits at least 90%, 91%, 92%, 93%, 94%, 95%, 96%, 97%, 98% or 99% sequence identity to any of SEQ ID NOS: 256-274, 417,459, or 461 and binds CD3.

90-94. (canceled)

95. The B7H3-binding polypeptide construct of claim 60, wherein the at least one B7H3 single domain antibody is positioned amino-terminally relative to the Fc region and/or carboxy-terminally relative to the anti-CD3 antibody or antigen-binding fragment.

96-128. (canceled)

129. The B7H3-binding polypeptide construct of claim 96, wherein one or both of the first and second components comprises at least one co-stimulatory receptor binding region (CRBR) that binds a co-stimulatory receptor.

130-140. (canceled)

141. The B7H3-binding polypeptide construct of claim 96, wherein one or both of the first and second components comprises at least one inhibitory receptor binding region (IRBR) that binds an inhibitory receptor.

142-153. (canceled)

154. The B7H3-binding polypeptide construct of claim 96, wherein the linker is a non-cleavable linker.

155-163. (canceled)

164. An isolated single domain antibody that binds B7H3, comprising a complementarity determining region 1 (CDR1) comprising an amino acid sequence selected from the group consisting of SEQ ID NO: 115, 116, 117, 118, 119, 120, 121, 122, 123, 124, 125, 126, 127, 128, 129, 130, 131, 132, 133, 134, 135, 136, 137, 138, 139, 140, 141, 142, 143, 144 and 145; a complementarity determining region 2 (CDR2) comprising an amino acid sequence selected from the group consisting of SEQ ID NO: 146, 147, 148, 149, 150, 151, 152, 153, 154, 155, 156, 157, 158, 159, 160, 161, 162, 163, 164, 165, 166 and 167; and a complementarity determining region 3 (CDR3) comprising an amino acid sequence selected from the group consisting of SEQ ID NO: 168, 169, 170, 171, 172, 173, 174, 175, 176, 177, 178, 179, 180, 181, 182, 183, 184, 185, 186, 187, 188, 189, and 483-488.

165-190. (canceled)

191. A polynucleotide(s) encoding the B7H3-binding polypeptide of claim 3.

192-195. (canceled)

196. A polynucleotide encoding the single domain antibody of claim 164.

197. A vector, comprising the polynucleotide or polynucleotides of claim 191.

198-199. (canceled)

200. A cell, comprising the polynucleotide or polynucleotides of claim 191.

201-202. (canceled)

203. A method of producing a polypeptide, the method comprising introducing into a cell a polynucleotide or polynucleotides of claim 191 and culturing the cell under conditions to produce the multispecific polypeptide construct.

204-205. (canceled)

206. An engineered immune cell comprising a chimeric antigen receptor comprising:
an extracellular domain comprising the single domain antibody of claim 164;
a transmembrane domain; and
an intracellular signaling domain.

207-212. (canceled)

213. A pharmaceutical composition comprising the B7H3-binding polypeptide of claim 3.

214. A pharmaceutical composition comprising the engineered immune cell of claim 206.

215. (canceled)

216. A method of stimulating or inducing an immune response in a subject, the method comprising administering, to a subject in need thereof, the pharmaceutical composition of claim 213.

217-218. (canceled)

219. A method of treating a disease or condition in a subject, the method comprising administering, to a subject in need thereof, a therapeutically effective amount of the pharmaceutical composition of claim 213.

220. A method of treating a disease or condition in a subject, the method comprising administering, to a subject in need thereof, the pharmaceutical composition of claim 214.

221. (canceled)

The application's sequence listing, which the Patent Office published only in electronic form, follows.

SEQUENCE LISTING (559 sequences)

SEQ ID NO: 1 - protein, 118 aa, Artificial Sequence
  L1A5
QLQLQESGGGLVQAGDSLRLSCAASGFSFGSNVMMWVRQAPGKGPEWVSTIYSSGTGTFYADSVKGRFTISRNNAKNTLYLQMNSLKPDDTAVYYCATSGPVRGWGPRSQGTLVTVKP

SEQ ID NO: 2 - protein, 120 aa, Artificial Sequence
  hz1A5v1
EVQLVESGGGEVQPGGSLRLSCAASGFSFGSNVMMWVRQAPGKGPEWVSTIYSSGTGTFYAESVKGRFTISRDNAKNTLYLQMSSLRAEDTAVYYCATSGPVRGWGPRSQGTLVTVKPGG

SEQ ID NO: 3 - protein, 120 aa, Artificial Sequence
  hz1A5v2
EVQLVESGGGEVQPGGSLRLSCAASGFSFGSNVMMWVRQAPGKGPEWVSTIYSSGTGTFYAESVKGRFTISRNNAKNTLYLQMSSLRAEDTAVYYCATSGPVRGWGPRSQGTLVTVKPGG

SEQ ID NO: 4 - protein, 120 aa, Artificial Sequence
  hz1A5v3
EVQLVESGGGEVQPGGSLRLSCAASGFSFGSNVMMWVRQAPGKGPEWVSTIYSSGTGTFYAESVKGRFTISRNNAKNTLYLQMSSLRAEDTAVYYCATSGPVRGWGPRGQGTLVTVKPGG

SEQ ID NO: 5 - protein, 120 aa, Artificial Sequence
  hz1A5v7
EVQLVESGGGEVQPGGSLRLSCAASGFSFGSNVMMWVRQAPGKGPEWVSTIYSSGTGTFYAESVKGRFTISRNNAKNTLYLQMSSLKPDDTAVYYCATSGPVRGWGPRSQGTLVTVKPGG

SEQ ID NO: 6 - protein, 120 aa, Artificial Sequence
  hz1A5v8
EVQLVESGGGLVQAGDSLRLSCAASGFSFGSNVMMWVRQAPGKGPEWVSTIYSSGTGTFYAESVKGRFTISRNNAKNTLYLQMSSLRAEDTAVYYCATSGPVRGWGPRSQGTLVTVKPGG

SEQ ID NO: 7 - protein, 120 aa, Artificial Sequence
  hz1A5v9
EVQLVESGGGEVQPGGSLRLSCAASGFSFGSNVMMWVRQAPGKGPEWVSTIYSRGTGTFYAESVKGRFTISRNNAKNTLYLQMSSLRAEDTAVYYCATSGPVRGWGPRSQGTLVTVKPGG

SEQ ID NO: 8 - protein, 118 aa, Artificial Sequence
  hz1A5v12
EVQLVESGGGEVQPGGSLRLSCAASGFSFGSNVMMWVRQAPGKGPEWVSTIYSSGTGTFYAESVKGRFTISRDNAKNTLYLQMSSLRAEDTAVYYCATSGPVRGWGPWSQGTLVTVKP

SEQ ID NO: 9 - protein, 118 aa, Artificial Sequence
  hz1A5v17
EVQLVESGGGEVQPGGSLRLSCAASGFSFGSNVMMWVRQAPGKGPEWVSTIYSRGTGTFYAESVKGRFTISRDNAKNTLYLQMSSLRAEDTAVYYCATSGPVRGWGPRSQGTLVTVKP

SEQ ID NO: 10 - protein, 118 aa, Artificial Sequence
  hz1A5v24
EVQLVESGGGEVQPGGSLRLSCAASGFSFGSNVMMWVRQAPGKGPEWVSTIYSSGTGTFYAESVKGRFTISRDNAKNTLYLQMSSLRAEDTAVYYCATSGPVRGWGPRTQGTLVTVKP

SEQ ID NO: 11 - protein, 118 aa, Artificial Sequence
  hz1A5v25
EVQLVESGGGEVQPGGSLRLSCAASGFSFGSNVMMWVRQAPGKGLEWVSTIYSSGTGTFYAESVKGRFTISRDNAKNTLYLQMSSLRAEDTAVYYCATSGPVRGWGPRSQGTLVTVKP

SEQ ID NO: 12 - protein, 118 aa, Artificial Sequence
  hz1A5v28
EVQLVESGGGEVQAGGSLRLSCAASGFSFGSNVMMWVRQAPGKGPEWVSTIYSSGTGTFYAESVKGRFTISRDNAKNTLYLQMSSLRAEDTAVYYCATSGPVRGWGPRSQGTLVTVKP

SEQ ID NO: 13 - protein, 118 aa, Artificial Sequence
  hz1A5v29
EVQLVESGGGEVQPGGSLRLSCAASGFSFGSNVMMWVRQAPGKGLEWVSTIYSSGTGTFYAESVKGRFTISRDNAKNTLYLQMSSLRAEDTAVYYCATSGPVRGWGPRTQGTLVTVKP

SEQ ID NO: 14 - protein, 118 aa, Artificial Sequence
  hz1A5v30
EVQLVESGGGEVQPGGSLRLSCAASGFSFGSNVMMWVRQAPGKGLEWVSTIYSRGGSTFYAESVKGRFTISRDNAKNTLYLQMSSLRAEDTAVYYCATSGPVRGWGPRSQGTLVTVKP

SEQ ID NO: 15 - protein, 118 aa, Artificial Sequence
  hz1A5v31
EVQLVESGGGEVQPGGSLRLSCAASGFSFGSNVMMWVRQAPGKGLEWVSTIYSSGTGTYYAESVKGRFTISRDNAKNTLYLQMSSLRAEDTAVYYCATSGPVRGWGPRSQGTLVTVKP

SEQ ID NO: 16 - protein, 118 aa, Artificial Sequence
  hz1A5v32
EVQLVESGGGEVQPGGSLRLSCAASGFSFGSNVMMWVRQAPGKGLEWVSTIYSRGGSTYYAESVKGRFTISRDNAKNTLYLQMSSLRAEDTAVYYCATSGPVRGWGPRSQGTLVTVKP

SEQ ID NO: 17 - protein, 118 aa, Artificial Sequence
  hz1A5v33
EVQLVESGGGEVQPGGSLRLSCAASGFSFGSNVMMWVRQAPGKGLEWVSTIYSRGTGTFYAESVKGRFTISRDNAKNTLYLQMSSLRAEDTAVYYCATSGPVRGWGPRSQGTLVTVKP

SEQ ID NO: 18 - protein, 118 aa, Artificial Sequence
  hz1A5v34
EVQLVESGGGEVQPGGSLRLSCAASGFSFGSNVMMWVRQAPGKGREWVSTIYSSGTGTFYAESVKGRFTISRDNAKNTLYLQMSSLRAEDTAVYYCATSGPVRGWGPRSQGTLVTVKP

SEQ ID NO: 19 - protein, 118 aa, Artificial Sequence
  hz1A5v35
EVQLVESGGGEVQPGGSLRLSCAASGFSFGSYVMMWVRQAPGKGLEWVSTIYSSGTGTFYAESVKGRFTISRDNAKNTLYLQMSSLRAEDTAVYYCATSGPVRGWGPRSQGTLVTVKP

SEQ ID NO: 20 - protein, 118 aa, Artificial Sequence
  hz1A5v36
EVQLVESGGGEVQPGGSLRLSCAASGFSFGSFVMMWVRQAPGKGLEWVSTIYSSGTGTFYAESVKGRFTISRDNAKNTLYLQMSSLRAEDTAVYYCATSGPVRGWGPRSQGTLVTVKP

SEQ ID NO: 21 - protein, 117 aa, Artificial Sequence
  hz1A5v37
EVQLVESGGGEVQPGGSLRLSCAASGFTFGSNVMMWVRQAPGKGEWVSTIYSSGTGTFYAESVKGRFTISRDNAKNTLYLQMSSLRAEDTAVYYCATSGPVRGWGPRSQGTLVTVKP

SEQ ID NO: 22 - protein, 118 aa, Artificial Sequence
  hz1A5v38
EVQLVESGGGEVQPGGSLRLSCAASGFSFGSNVMMWVRQAPGKGLEWVSTIYSSGTGTFYAESVKGRFTISRDNAKNTLYLQMSSLRAEDTAVYYCATSGPVRGWGYRSQGTLVTVKP

SEQ ID NO: 23 - protein, 118 aa, Artificial Sequence
  hz1A5v39
EVQLVESGGGEVQPGGSLRLSCAASGFSFSSNVMMWVRQAPGKGLEWVSTIYSSGTGTFYAESVKGRFTISRDNAKNTLYLQMSSLRAEDTAVYYCATSGPVRGWGPRSQGTLVTVKP

SEQ ID NO: 24 - protein, 118 aa, Artificial Sequence
  hz1A5v40
EVQLVESGGGEVQPGGSLRLSCAASGFSFTSNVMMWVRQAPGKGLEWVSTIYSSGTGTFYAESVKGRFTISRDNAKNTLYLQMSSLRAEDTAVYYCATSGPVRGWGPRSQGTLVTVKP

SEQ ID NO: 25 - protein, 118 aa, Artificial Sequence
  hz1A5v41
EVQLVESGGGEVQPGGSLRLSCAPSGFSFGSNVMMWVRQAPGKGLEWVSTIYSRGTGTFYAESVKGRFTISRDNAKNTLYLQMSSLRAEDTAVYYCATSGPVRGWGPRSQGTLVTVKP

SEQ ID NO: 26 - protein, 118 aa, Artificial Sequence
  hz1A5v42
EVQLVESGGGEVQPGGSLRLSCGPSGFSFGSNVMMWVRQAPGKGLEWVSTIYSRGTGTFYAESVKGRFTISRDNAKNTLYLQMSSLRAEDTAVYYCATSGPVRGWGPRSQGTLVTVKP

SEQ ID NO: 27 - protein, 118 aa, Artificial Sequence
  hz1A5v43
EVQLVESGGGEVQPGGSLRLSCAASGFSFGSNVMMWVRQAPGKGLEWVSTIYSRGTGTFYAESVKGRFTISRDNAKNTLYLQMSSLRPEDTAVYYCATSGPVRGWGPRSQGTLVTVKP

SEQ ID NO: 28 - protein, 118 aa, Artificial Sequence
  hz1A5v44
EVQLVESGGGEVQPGGSLRLSCAASGFSFGSNVMMWVRQAPGKGLEWVSTIYSRGTGTYYAESVKGRFTISRDNAKNTLYLQMSSLRAEDTAVYYCATSGPVRGWGPRSQGTLVTVKP

SEQ ID NO: 29 - protein, 118 aa, Artificial Sequence
  hz1A5v45
EVQLVESGGGEVQPGGSLRLSCAASGFSFGSYVMMWVRQAPGKGLEWVSTIYSRGTGTFYAESVKGRFTISRDNAKNTLYLQMSSLRAEDTAVYYCATSGPVRGWGPRSQGTLVTVKP

SEQ ID NO: 30 - protein, 117 aa, Artificial Sequence
  hz1A5v46
EVQLVESGGGEVQPGGSLRLSCAASGFTFGSNVMMWVRQAPGKGEWVSTIYSRGTGTFYAESVKGRFTISRDNAKNTLYLQMSSLRAEDTAVYYCATSGPVRGWGPRSQGTLVTVKP

SEQ ID NO: 31 - protein, 118 aa, Artificial Sequence
  hz1A5v47
EVQLVESGGGEVQPGGSLRLSCAASGFSFSSNVMMWVRQAPGKGLEWVSTIYSRGTGTFYAESVKGRFTISRDNAKNTLYLQMSSLRAEDTAVYYCATSGPVRGWGPRSQGTLVTVKP

SEQ ID NO: 32 - protein, 118 aa, Artificial Sequence
  hz1A5v48
EVQLVESGGGEVQPGGSLRLSCAASGFSFGSYVMMWVRQAPGKGLEWVSTIYSRGTGTYYAESVKGRFTISRDNAKNTLYLQMSSLRAEDTAVYYCATSGPVRGWGPRSQGTLVTVKP

SEQ ID NO: 33 - protein, 118 aa, Artificial Sequence
  hz1A5v49
EVQLVESGGGEVQPGGSLRLSCAASGFTFSSNVMMWVRQAPGKGLEWVSTIYSRGTGTFYAESVKGRFTISRDNAKNTLYLQMSSLRAEDTAVYYCATSGPVRGWGPRSQGTLVTVKP

SEQ ID NO: 34 - protein, 118 aa, Artificial Sequence
  hz1A5v50
EVQLVESGGGEVQPGGSLRLSCAASGFTFSSYVMMWVRQAPGKGLEWVSTIYSRGTGTYYAESVKGRFTISRDNAKNTLYLQMSSLRAEDTAVYYCATSGPVRGWGPRSQGTLVTVKP

SEQ ID NO: 35 - protein, 125 aa, Artificial Sequence
  L57B04
EVQLVQSGGGLVQAGDSLRLSCAPSERTFSTYTMGWFRQAPGKEREFVAVVNWSGGSKYYADSVKGRFTISRDNAKNAVYLHMNSLKPEDTGVYYCAAGGAYSGPYYDTRQYTYWGQGTQVTVKP

SEQ ID NO: 36 - protein, 127 aa, Artificial Sequence
  hz57B04v3
EVQLVESGGGEVQPGGSLRLSCAASERTFSTYTMGWFRQAPGKEREFVAVVNWSGGSKYYAESVKGRFTISRDNAKNTVYLQMNSLRAEDTAVYYCAAGGAYSGPYYDTRQYTYWGQGTLVTVKPGG

SEQ ID NO: 37 - protein, 127 aa, Artificial Sequence; identical to SEQ ID NO: 36
  hz57B04v4

SEQ ID NO: 38 - protein, 127 aa, Artificial Sequence
  hz57B04v8
EVQLVESGGGEVQPGGSLRLSCAPSERTFSTYTMGWFRQAPGKEREFVAVVNWSGGSKYYAESVKGRFTISRDNAKNTVYLQMNSLRAEDTAVYYCAAGGAYSGPYYDTRQYTYWGQGTLVTVKPGG

SEQ ID NO: 39 - protein, 127 aa, Artificial Sequence
  hz57B04v9
EVQLVESGGGEVQPGGSLRLSCAASERTFSTYTMGWFRQAPGKEREFVAVVNWSGGSKYYAESVKGRFTISRDNAKNTVYLHMNSLRAEDTAVYYCAAGGAYSGPYYDTRQYTYWGQGTLVTVKPGG

SEQ ID NO: 40 - protein, 125 aa, Artificial Sequence
  hz57B04v15
EVQLVESGGGEVQPGGSLRLSCAPSERTFSTYTMGWFRQAPGKEREFVAVVNWGGGSKYYAESVKGRFTISRDNAKNTVYLQMNSLRAEDTAVYYCAAGGAYSGPYYDTRQYTYWGQGTLVTVKP

SEQ ID NO: 41 - protein, 125 aa, Artificial Sequence
  hz57B04v20
EVQLVESGGGEVQPGGSLRLSCAPSERTFSTYTMGWFRQAPGKEREFVAVVNWGGGSKYYAESVKGRFTISRDNAKNTVYLQMNSLRAEDTAVYYCAAGGAYSTPYYDTRQYTYWGQGTLVTVKP

SEQ ID NO: 42 - protein, 127 aa, Artificial Sequence
  hz57B04v23
EVQLVESGGGEVQPGGSLRLSCAPSERTFSTYTMGWFRQAPGKEREFVAVVNWSGGSKYYAESVKGRFTISRDNAKNTVYLQMSSLRAEDTAVYYCAAGGAYSGPYYDTRQYTYWGQGTLVTVKPGG

SEQ ID NO: 43 - protein, 127 aa, Artificial Sequence
  hz57B04v24
EVQLVESGGGEVQPGGSLRLSCAPSERTFSTYTMGWFRQAPGKEREFVAVVNWGGGSKYYAESVKGRFTISRDNAKNTVYLQMSSLRAEDTAVYYCAAGGAYSGPYYDTRQYTYWGQGTLVTVKPGG

SEQ ID NO: 44 - protein, 117 aa, Artificial Sequence
  L58E05
EVQLVQSGGGLVQAGGSLRLSCAASGSTFSMYHMSWFRQAPGKQREPVATSHHGGTTNYAGSVKGRFTIFRDNAKNTVYLQMNSLKPEDTGVYYCKADHGYNGRGYWGQGTQVTVKP

SEQ ID NO: 45 - protein, 119 aa, Artificial Sequence
  hz58E05v1
EVQLVESGGGEVQPGGSLRLSCAASGSTFSMYHMSWFRQAPGKGREPVSTSHHGGTTNYAESVKGRFTISRDNAKNTLYLQMNSLRAEDTAVYYCKADHGYNGRGYWGQGTLVTVKPGG

SEQ ID NO: 46 - protein, 119 aa, Artificial Sequence
  hz58E05v2
EVQLVESGGGEVQPGGSLRLSCAASGSTFSMYHMSWFRQAPGKQREPVSTSHHGGTTNYAESVKGRFTISRDNAKNTLYLQMNSLRAEDTAVYYCKADHGYNGRGYWGQGTLVTVKPGG

SEQ ID NO: 47 - protein, 119 aa, Artificial Sequence
  hz58E05v3
EVQLVESGGGEVQPGGSLRLSCAASGSTFSMYHMSWFRQAPGKQREPVSTSHHGGTTNYAESVKGRFTISRDNAKNTVYLQMNSLRAEDTAVYYCKADHGYNGRGYWGQGTLVTVKPGG

SEQ ID NO: 48 - protein, 119 aa, Artificial Sequence
  hz58E05v4
EVQLVESGGGEVQPGGSLRLSCAASGSTFSMYHMSWFRQAPGKQREPVATSHHGGTTNYAESVKGRFTISRDNAKNTVYLQMNSLRAEDTAVYYCKADHGYNGRGYWGQGTLVTVKPGG

SEQ ID NO: 49 - protein, 119 aa, Artificial Sequence
  hz58E05v5
EVQLVESGGGEVQPGGSLRLSCAASGSTFSMYHMSWFRQAPGKQREPVATSHHGGTTNYAESVKGRFTISRDNAKNTVYLQMNSLRAEDTAVYYCKADHGYQGRGYWGQGTLVTVKPGG

SEQ ID NO: 50 - protein, 119 aa, Artificial Sequence
  hz58E05v6
EVQLVESGGGEVQPGGSLRLSCAASGSTFSMYHMSWFRQAPGKQREPVATSHHGGTTNYAESVKGRFTISRDNAKNTVYLQMNSLRAEDTAVYYCKADHGYNARGYWGQGTLVTVKPGG

SEQ ID NO: 51 - protein, 119 aa, Artificial Sequence
  hz58E05v7
EVQLVESGGGEVQPGGSLRLSCAASGSTFSMYHMSWFRQAPGKQREPVATSHHGGTTNYAESVKGRFTISRDNAKNTVYLQMNSLRAEDTAVYYCKADHGYNTRGYWGQGTLVTVKPGG

SEQ ID NO: 52 - protein, 119 aa, Artificial Sequence
  hz58E05v8
EVQLVESGGGEVQPGGSLRLSCAASGSTFSMYHMSWFRQAPGKQREPVATSHHGGTTNYAGSVKGRFTISRDNAKNTVYLQMNSLRAEDTAVYYCKADHGYNGRGYWGQGTLVTVKPGG

SEQ ID NO: 53 - protein, 119 aa, Artificial Sequence
  hz58E05v9
EVQLVESGGGEVQPGGSLRLSCAASGSTFSMYHMSWFRQAPGKQREPVATSHHGGTTNYAESVKGRFTISRDNAKNTLYLQMNSLRAEDTAVYYCKADHGYQGRGYWGQGTLVTVKPGG

SEQ ID NO: 54 - protein, 118 aa, Artificial Sequence
  hz58E05v10
EVQLVESGGGEVQPGGSLRLSCAASGSTFSMYHMSWFRQAPGKQREPVATSHHGGTTNYAESVKGRFTISRDNAKNTLYLQMNSLRAEDTAVYYCKADHGYNARGYWGQGTLVTVKPG

SEQ ID NO: 55 - protein, 118 aa, Artificial Sequence
  hz58E05v11
EVQLVESGGGEVQPGGSLRLSCAASGSTFSMYHMSWFRQAPGKQREPVATSHHGGTTNYAESVKGRFTISRDNAKNTLYLQMNSLRAEDTAVYYCKADHGYNTRGYWGQGTLVTVKPG

SEQ ID NO: 56 - protein, 117 aa, Artificial Sequence
  hz58E05v13
EVQLVESGGGEVQPGGSLRLSCAASGSTFSMYHMSWFRQAPGKQREPVSTSHHGGTTNYAESVKGRFTISRDNAKNTLYLQMNSLRAEDTAVYYCKADHGYQGRGYWGQGTLVTVKP

SEQ ID NO: 57 - protein, 117 aa, Artificial Sequence
  hz58E05v16
EVQLVESGGGEVQPGGSLRLSCAASGSTFSLYHMSWFRQAPGKQREPVATSHHGGTTNYAGSVKGRFTISRDNAKNTVYLQMNSLRAEDTAVYYCKADHGYQGRGYWGQGTLVTVKP

SEQ ID NO: 58 - protein, 117 aa, Artificial Sequence
  hz58E05v18
EVQLVESGGGEVQPGGSLRLSCAASGSTFSSYHMSWFRQAPGKQREPVATSHHGGTTNYAGSVKGRFTISRDNAKNTVYLQMNSLRAEDTAVYYCKADHGYQGRGYWGQGTLVTVKP

SEQ ID NO: 59 - protein, 117 aa, Artificial Sequence
  hz58E05v19
EVQLVESGGGEVQPGGSLRLSCAASGSTFSMYHMSWFRQAPGKEREPVATSHHGGTTNYAGSVKGRFTISRDNAKNTVYLQMNSLRAEDTAVYYCKADHGYQGRGYWGQGTLVTVKP

SEQ ID NO: 60 - protein, 117 aa, Artificial Sequence
  hz58E05v20
EVQLVESGGGEVQPGGSLRLSCAASGSTFSTYHMSWFRQAPGKQREPVATSHHGGTTNYAGSVKGRFTISRDNAKNTVYLQMNSLRAEDTAVYYCKADHGYQGRGYWGQGTLVTVKP

SEQ ID NO: 61 - protein, 117 aa, Artificial Sequence
  hz58E05v21
EVQLVESGGGEVQPGGSLRLSCAASGSTFSKYHMSWFRQAPGKQREPVATSHHGGTTNYAGSVKGRFTISRDNAKNTVYLQMNSLRAEDTAVYYCKADHGYQGRGYWGQGTLVTVKP

SEQ ID NO: 62 - protein, 117 aa, Artificial Sequence
  hz58E05v22
EVQLVESGGGEVQPGGSLRLSCAASGSTFSFYHMSWFRQAPGKQREPVATSHHGGTTNYAGSVKGRFTISRDNAKNTVYLQMNSLRAEDTAVYYCKADHGYQGRGYWGQGTLVTVKP

SEQ ID NO: 63 - protein, 117 aa, Artificial Sequence
  hz58E05v23
EVQLVESGGGEVQPGGSLRLSCAASGSTFSDYHMSWFRQAPGKQREPVATSHHGGTTNYAGSVKGRFTISRDNAKNTVYLQMNSLRAEDTAVYYCKADHGYQGRGYWGQGTLVTVKP

SEQ ID NO: 64 - protein, 117 aa, Artificial Sequence
  hz58E05v24
EVQLVESGGGEVQPGGSLRLSCAASGSTFSRYHMSWFRQAPGKQREPVATSHHGGTTNYAGSVKGRFTISRDNAKNTVYLQMNSLRAEDTAVYYCKADHGYQGRGYWGQGTLVTVKP

SEQ ID NO: 65 - protein, 117 aa, Artificial Sequence
  hz58E05v25
EVQLVESGGGEVQPGGSLRLSCAASGSTFSMYHMSWFRQAPGKQREPVATSHHGGTTNYAGSVKGRFTISRDNAKNTVYLQMSSLRAEDTAVYYCKADHGYQGRGYWGQGTLVTVKP

SEQ ID NO: 66 - protein, 117 aa, Artificial Sequence
  hz58E05v26
EVQLVESGGGEVQPGGSLRLSCAASGSTFSMYHMSWFRQAPGKQREPVATSHHGGTTNYAGSVKGRFTISRDNAKNTVYLQMNTLRAEDTAVYYCKADHGYQGRGYWGQGTLVTVKP

SEQ ID NO: 67 - protein, 117 aa, Artificial Sequence
  hz58E05v27
EVQLVESGGGEVQPGGSLRLSCAASGSTFSSYHMSWFRQAPGKQREPVATSHHGGTTNYAGSVKGRFTISRDNAKNTVYLQMNTLRAEDTAVYYCKADHGYQGRGYWGQGTLVTVKP

SEQ ID NO: 68 - protein, 117 aa, Artificial Sequence
  hz58E05v28
EVQLVESGGGEVQPGGSLRLSCAASGSTFSMYHMSWFRQAPGKQREPVATSHHGGTTNYAGSVKGRFTIFRDNAKNTVYLQMNSLRAEDTAVYYCKADHGYNGRGYWGQGTLVTVKP

SEQ ID NO: 69 - protein, 117 aa, Artificial Sequence
  hz58E05v29
EVQLVESGGGEVQPGGSLRLSCAASGSTFSMYHMSWFRQAPGKQREPVATSHHGGTTNYAGSVKGRFTISRDNAKNTVYLQMNSLKPEDTGVYYCKADHGYNGRGYWGQGTLVTVKP

SEQ ID NO: 70 - protein, 117 aa, Artificial Sequence
  hz58E05v30
EVQLVESGGGEVQPGGSLRLSCAASGSTFSMYHMSWFRQAPGKQREPVATSHHGGTTNYAGSVKGRFTISRDNAKNTVYLQMNSLRPEDTAVYYCKADHGYNGRGYWGQGTLVTVKP

SEQ ID NO: 71 - protein, 117 aa, Artificial Sequence
  hz58E05v31
EVQLVESGGGEVQPGGSLRLSCAASGSTFSMYHMSWFRQAPGKQREPVATSHHGGTTNYAGSVKGRFTISRDNAKNTVYLQMNSLRPEDTAVYYCKADHGYQGRGYWGQGTLVTVKP

SEQ ID NO: 72 - protein, 117 aa, Artificial Sequence
  hz58E05v32
EVQLVESGGGEVQPGGSLRLSCAASGSTFSSYHMSWFRQAPGKQREPVATSHHGGTTNYAGSVKGRFTISRDNAKNTVYLQMNSLRPEDTAVYYCKADHGYQGRGYWGQGTLVTVKP

SEQ ID NO: 73 - protein, 117 aa, Artificial Sequence
  hz58E05v36
EVQLVESGGGEVQPGGSLRLSCAASGSTFSMYHMSWFRQAPGKQREPVATSHHGGTTNYAGSVKGRFTISRDNAKNTVYLQMNSLRPEDTAVYYCKADHGYGGRGYWGQGTLVTVKP

SEQ ID NO: 74 - protein, 117 aa, Artificial Sequence
  hz58E05v37
EVQLVESGGGEVQPGGSLRLSCAASGSTFSMYHMSWFRQAPGKQREPVATSHHGGTTNYAGSVKGRFTISRDNAKNTVYLQMNSLRPEDTAVYYCKADHGYSGRGYWGQGTLVTVKP

SEQ ID NO: 75 - protein, 117 aa, Artificial Sequence
  hz58E05v38
EVQLVESGGGEVQPGGSLRLSCAASGSTFSMYHMSWFRQAPGKQREPVATSHHGGTTNYAGSVKGRFTISRDNAKNTVYLQMNSLRPEDTAVYYCKADHGYVGRGYWGQGTLVTVKP

SEQ ID NO: 76 - protein, 117 aa, Artificial Sequence
  hz58E05v39
EVQLVESGGGEVQPGGSLRLSCAASGSTFSMYHMSWFRQAPGKQREPVATSHHGGTTNYAGSVKGRFTISRDNAKNTVYLQMNSLRPEDTAVYYCKADHGYEGRGYWGQGTLVTVKP

SEQ ID NO: 77 - protein, 117 aa, Artificial Sequence
  hz58E05v40
EVQLVESGGGEVQPGGSLRLSCAASGSTFSMYHMSWFRQAPGKQREPVATSHHGGTTNYAGSVKGRFTISRDNAKNTVYLQMNSLRPEDTAVYYCKADHGYNPRGYWGQGTLVTVKP

SEQ ID NO: 78 - protein, 117 aa, Artificial Sequence
  hz58E05v41
EVQLVESGGGEVQPGGSLRLSCAASGSTFSMYHMSWFRQAPGKQREPVATSHHGGTTNYAGSVKGRFTISRDNAKNTVYLQMNSLRPEDTAVYYCKADHGYGNRGYWGQGTLVTVKP

SEQ ID NO: 79 - protein, 117 aa, Artificial Sequence
  hz58E05v42
EVQLVESGGGEVQPGGSLRLSCAASGSTFSMYHMSWFRQAPGKQREPVATSHHGGTTNYAGSVKGRFTISRDNAKNTVYLQMNSLRPEDTAVYYCKADHGNYGRGYWGQGTLVTVKP

SEQ ID NO: 80 - protein, 117 aa, Artificial Sequence
  hz58E05v43
EVQLVESGGGEVQPGGSLRLSCAASGSTFSMYHMSWFRQAPGKQREPVATSHHGGTTNYAGSVKGRFTISRDNAKNTVYLQMNSLRPEDTAVYYCKADHGYNRGGYWGQGTLVTVKP

SEQ ID NO: 81 - protein, 117 aa, Artificial Sequence
  hz58E05v44
EVQLVESGGGEVQPGGSLRLSCAASGSTFSSYHMSWFRQAPGKQREPVATSHHGGTTNYAGSVKGRFTISRDNAKNTVYLQMNSLRPEDTAVYYCKADHGYGGRGYWGQGTLVTVKP

SEQ ID NO: 82 - protein, 117 aa, Artificial Sequence
  hz58E05v45
EVQLVESGGGEVQPGGSLRLSCAASGSTFSSYHMSWFRQAPGKQREPVATSHHGGTTNYAGSVKGRFTISRDNAKNTVYLQMNSLRPEDTAVYYCKADHGYEGRGYWGQGTLVTVKP

SEQ ID NO: 83 - protein, 117 aa, Artificial Sequence
  hz58E05v46
EVQLVESGGGEVQPGGSLRLSCAASGSTFSSYHMSWFRQAPGKQREPVATSHHGGTTNYAGSVKGRFTISRDNAKNTVYLQMNSLRPEDTAVYYCKADHGNYGRGYWGQGTLVTVKP

SEQ ID NO: 84 - protein, 117 aa, Artificial Sequence
  hz58E05v47
EVQLVESGGGEVQPGGSLRLSCAASGSTFSIYHMSWFRQAPGKQREPVATSHHGGTTNYAGSVKGRFTISRDNAKNTVYLQMNSLRPEDTAVYYCKADHGYGGRGYWGQGTLVTVKP

SEQ ID NO: 85 - protein, 117 aa, Artificial Sequence
  hz58E05v48
EVQLVESGGGEVQPGGSLRLSCAASGFTFSSYHMSWFRQAPGKQREPVATSHHGGTTNYAGSVKGRFTISRDNAKNTVYLQMNTLRAEDTAVYYCKADHGYQGRGYWGQGTLVTVKP

SEQ ID NO: 86 - protein, 117 aa, Artificial Sequence
  hz58E05v49
EVQLVESGGGEVQPGGSLRLSCAASGSTFSSYHMSWFRQAPGKQRELVATSHHGGTTNYAGSVKGRFTISRDNAKNTVYLQMNTLRAEDTAVYYCKADHGYQGRGYWGQGTLVTVKP

SEQ ID NO: 87 - protein, 117 aa, Artificial Sequence
  hz58E05v50
EVQLVESGGGEVQPGGSLRLSCAASGSTFSSYHMSWFRQAPGKQREWVATSHHGGTTNYAGSVKGRFTISRDNAKNTVYLQMNTLRAEDTAVYYCKADHGYQGRGYWGQGTLVTVKP

SEQ ID NO: 88 - protein, 117 aa, Artificial Sequence
  hz58E05v51
EVQLVESGGGEVQPGGSLRLSCAASGSTFSSYHMSWFRQAPGKERELVATSHHGGTTNYAGSVKGRFTISRDNAKNTVYLQMNTLRAEDTAVYYCKADHGYQGRGYWGQGTLVTVKP

SEQ ID NO: 89 - protein, 117 aa, Artificial Sequence
  hz58E05v52
EVQLVESGGGEVQPGGSLRLSCAASGSTFSSYHMSWFRQAPGKEREFVATSHHGGTTNYAGSVKGRFTISRDNAKNTVYLQMNTLRAEDTAVYYCKADHGYQGRGYWGQGTLVTVKP

SEQ ID NO: 90 - protein, 117 aa, Artificial Sequence
  hz58E05v53
EVQLVESGGGEVQPGGSLRLSCAPSGSTFSSYHMSWFRQAPGKQREPVATSHHGGTTNYAGSVKGRFTISRDNAKNTVYLQMNTLRAEDTAVYYCKADHGYQGRGYWGQGTLVTVKP

SEQ ID NO: 91 - protein, 117 aa, Artificial Sequence
  hz58E05v54
EVQLVESGGGEVQPGGSLRLSCGPSGSTFSSYHMSWFRQAPGKQREPVATSHHGGTTNYAGSVKGRFTISRDNAKNTVYLQMNTLRAEDTAVYYCKADHGYQGRGYWGQGTLVTVKP

SEQ ID NO: 92 - protein, 125 aa, Artificial Sequence
  1A10
QVQLVQSGGGLVQAGGSLRLSCAASGLTFDEHHMGWFRQAPGKEREFVAAITWHTGTTWYADSVKGRFTISRDDAKNTVALQMNALKTDDTALYYCVDGRRPFFIREVGVEPDYWGQGTQVTVKP

SEQ ID NO: 93 - protein, 118 aa, Artificial Sequence
  1E4
QVQLQESGGGWVQPGGSLRLSCAASGSSFGSNVMMWVRQAPGKGPEWVSTINSSGTGTFYADSVKGRFTISRNNAKNTLYLQMNSLKPDDTAVYYCATSGPVRGWGPRSQGTQVTVKP

SEQ ID NO: 94 - protein, 125 aa, Artificial Sequence
  D9
QVQLVQSGGGLVQPGGSLRLSCAASGFTFASTGMSWVRQAPGKGPEWVSSINSGSDSTMYADSVKGRFTISRDNAMNMLFLQMNSLKPEDTAVYYCAKWALSCSGYGCDDLPQDAGQGTQVTVKP

SEQ ID NO: 95 - protein, 125 aa, Artificial Sequence
  A3
QVQLVQSGGGLVQPGGSLRLSCAASGFTFASYGMSWVRQAPGKGPEWVSSINSGSDTSMYADSVKGRFTISRDSAKNMLFLQMNSLKPEDTGVYYCAKWALSCSQYGCDDLPRPAGQGTQVTVKP

SEQ ID NO: 96 - protein, 118 aa, Artificial Sequence
  E9
QVQLQQSGGGEAQPGGSLRLSCAASGRTFSSYAMSWYRQAPGKGREWVATITSSGSTTYYAESVKGRFTISRDNAKNTVYLQMSSLRAEDTAVYYCNKYTSRTVRDYWGQGTQVTVKP

SEQ ID NO: 97 - protein, 118 aa, Artificial Sequence
  B4
EVQLVQSGGGEVQPGGSLRLSCAASGRTFSSYAMSWYRQAPGKGREWVATITTGGGTTYYAESVKGRFTISRDNAKNTVYLQMSSLRAEDTAVYYCNKYTSRFPRDYWGQGTQVTVKP

SEQ ID NO: 98 - protein, 116 aa, Artificial Sequence
  57B06
QVQLVQDGDSLRLSCKASGGTFSSYAMGWFRQAPGQEREFVAAISSEGGSTYYADNMEGRFTTSRDNAKNTVYLQMNSLKPEDTAVYYCAVKGVGWPQEQASYDYWGQGTQVTVKP

SEQ ID NO: 99 - protein, 122 aa, Artificial Sequence
  57B10
QVQLQQSGGGLVQPGGSMRLSCAASGSIPSIDHMGWYRQAPGKERELVASIDLNGRTNYAGPVKGRFAISRDSAKNTMYLQMNSLLPEDTAVYYCNHRWGSPDYYHDDVDYWGQGTQVTVKP

SEQ ID NO: 100 - protein, 123 aa, Artificial Sequence
  58B06
QVQLVQSGGGLVQAGGSLRLSCAASGRSFSTYAMGWFRQAPGKELEFVAAVGWRGTNTYYQDSVKGRFTISRDNAKNTVYLQMSSLKPEDTAVYYCAMGEPIRVGEKSGYDYWGQGTQVTVKP

SEQ ID NO: 101 - protein, 123 aa, Artificial Sequence
  57A12
QVQLQQSGGGLVQAGDSLRLSCEASGGTFSSYAMGWFRQAPRQEREFVAAISSEGGSTYYADNLEGRFTTSRDNAKNTVYLQMNSLKPEDTAVYYCAVKGVGWPQEQASYDYWGQGTQVTVKP

SEQ ID NO: 102 - protein, 124 aa, Artificial Sequence
  57B08
QVQLVQSGGGLVQAGGSLRLSCAASGLTFSSYAMGWFRHPPGKEREFVAAISWSGGNTLYADSVKGRFTISRDNSKNTVYLQMNSLKPEDTAVYSCAVGPRDYFSDLEVDFGSWGQGTQVTVKP

SEQ ID NO: 103 - protein, 123 aa, Artificial Sequence
  58A08
QVQLVQSGGGLVQAGDSLRLSCAASGRTFSSLAVGWFRQAPWKEREFVGAISWSGGNTYYVDAVEGRITISRDNAENTVYLQMNDLKPEDTAVYYCAAGLPIRVGVPGGYDYWGQGTQVTVKP

SEQ ID NO: 104 - protein, 124 aa, Artificial Sequence
  57D1
QVQLQQSGGGLVQAGGSLRLSCAASGHTFSTYAMGWFRQAPGKEREFVAGITRSGDSTHYEDSVKGRFTISRDNTKNTVYLRMNSLKPEDTAVYYCAAASFAYLSTYTHHYDYWGQGTQVTVKP

SEQ ID NO: 105 - protein, 123 aa, Artificial Sequence
  1H5
QVQLQQSGGGLVQAGGSLRLSCAASGRSFGDYTVGWFRQAPGKERDFVAGLSWLGGTIYYADSVKGRFTISRDNAKNTVYLQMTTLKPEDTAVYYCAASRSAISRKATDFGSWGQGTQVTVKP

SEQ ID NO: 106 - protein, 123 aa, Artificial Sequence
  hz1H5v1
EVQLVESGGGEVQPGGSLRLSCAASGRSFGDYTVGWFRQAPGKERDFVAGLSWLGGTIYYAESVKGRFTISRDNAKNTLYLQMSSLRAEDTAVYYCAASRSAISRKATDFGSWGQGTLVTVKP

SEQ ID NO: 107 - protein, 123 aa, Artificial Sequence
  hz1H5v2
EVQLVESGGGEVQPGGSLRLSCAASGRSFGDYTVGWFRQAPGKERDFVAGLSWLGGTIYYAESVKGRFTISRDNAKNTVYLQMSSLRAEDTAVYYCAASRSAISRKATDFGSWGQGTLVTVKP

SEQ ID NO: 108 - protein, 123 aa, Artificial Sequence
  hz1H5v3
EVQLVESGGGEVQPGGSLRLSCAASGRSFGDYTVGWFRQAPGKERDFVAGLSWLGGTIYYAESVKGRFTISRDNAKNTVYLQMTTLKPEDTAVYYCAASRSAISRKATDFGSWGQGTLVTVKP

SEQ ID NO: 109 - protein, 123 aa, Artificial Sequence
  hz1H5v4
EVQLVESGGGEVQPGGSLRLSCAASGRSFGDYTVGWFRQAPGKERDFVAGLSWLGGTIYYAESVKGRFTISRDNAKNTVYLQMSSLRAEDTAVYYCAASRSAISRKATDFGSWGQGTQVTVKP

SEQ ID NO: 110 - protein, 123 aa, Artificial Sequence
  L57B06
QVQLVQSGGGLVQDGDSLRLSCKASGGTFSSYAMGWFRQAPGQEREFVAAISSEGGSTYYADNMEGRFTTSRDNAKNTVYLQMNSLKPEDTAVYYCAVKGVGWPQEQASYDYWGQGTQVTVKP

SEQ ID NO: 111 - protein, 124 aa, Artificial Sequence
  h57B06v5
EVQLVESGGGEVQPGGSLRLSCAASGGTFSSYAMGWFRQAPGKEREFVAAISSEGGSTYYADNMEGRFTISRDNAKNTVYLQMSSLRAEDTAVYYCAVKGVGWPQEQASYDYWGQGTLVTVKPG

SEQ ID NO: 112 - protein, 124 aa, Artificial Sequence
  h57B06v6
EVQLVESGGGEVQPGGSLRLSCAASGGTFSSYAMGWFRQAPGKEREFVAAISSEGGSTYYAESMEGRFTISRDNAKNTVYLQMSSLRAEDTAVYYCAVKGVGWPQEQASYDYWGQGTLVTVKPG

SEQ ID NO: 113 - protein, 117 aa, Artificial Sequence
  h57B06v7
QVQLVQDGDSLRLSCAASGGTFSSYAMGWFRQAPGKEREFVAAISSEGGSTYYADNMEGRFTISRDNAKNTVYLQMSSLRAEDTAVYYCAVKGVGWPQEQASYDYWGQGTLVTVKPG

SEQ ID NO: 114 - protein, 124 aa, Artificial Sequence
  h57B06v8
EVQLVESGGGEVQPGGSLRLSCAASGGTFSSYAMGWFRQAPGQEREFVAAISSEGGSTYYAESVKGRFTISRDNAKNTVYLQMSSLRAEDTAVYYCAVKGVGWPQEQASYDYWGQGTLVTVKPG

SEQ ID NO: 115 - protein, 10 aa, Artificial Sequence
  CDR-H1 (L1A5, hz1A5v1,2,3,7,8,9,12,17,24,25,28,29,30,31,32,33,34 ,38,41,42,43,44)
GFSFGSNVMM

SEQ ID NO: 116 - protein, 10 aa, Artificial Sequence
  CDR-H1 (hz1A5v35,45,48)
GFSFGSYVMM

SEQ ID NO: 117 - protein, 10 aa, Artificial Sequence
  CDR-H1 (hz1A5v36)
GFSFGSFVMM

SEQ ID NO: 118 - protein, 10 aa, Artificial Sequence
  CDR-H1 (hz1A5v37,46)
GFTFGSNVMM

SEQ ID NO: 119 - protein, 10 aa, Artificial Sequence
  CDR-H1 (hz1A5v39,47)
GFSFSSNVMM

SEQ ID NO: 120 - protein, 10 aa, Artificial Sequence
  CDR-H1 (hz1A5v40)
GFSFTSNVMM

SEQ ID NO: 121 - protein, 10 aa, Artificial Sequence
  CDR-H1 (hz1A5v49)
GFTFSSNVMM

SEQ ID NO: 122 - protein, 10 aa, Artificial Sequence
  CDR-H1 (hz1A5v50)
GFTFSSYVMM

SEQ ID NO: 123 - protein, 10 aa, Artificial Sequence
  CDR-H1 (L57B04, hz57B04v3,4,8,9,15,20,23,24)
ERTFSTYTMG

SEQ ID NO: 124 - protein, 10 aa, Artificial Sequence
  CDR-H1 (L58E05, hz58E05v1,2,3,4,5,6,7,8,9,10,11,13,19,25,26,28,29, 30,31,36,37,38,39,40,41,42,43)
GSTFSMYHMS

SEQ ID NO: 125 - protein, 10 aa, Artificial Sequence
  CDR-H1 (hz58E05v16)
GSTFSLYHMS

SEQ ID NO: 126 - protein, 10 aa, Artificial Sequence
  CDR-H1 (hz58E05v18,27,32,44,45,46,49,50,51,52,53,54)
GSTFSSYHMS

SEQ ID NO: 127 - protein, 10 aa, Artificial Sequence
  CDR-H1 (hz58E05v20)
GSTFSTYHMS

SEQ ID NO: 128 - protein, 10 aa, Artificial Sequence
  CDR-H1 (hz58E05v21)
GSTFSKYHMS

SEQ ID NO: 129 - protein, 10 aa, Artificial Sequence
  CDR-H1 (hz58E05v22)
GSTFSFYHMS

SEQ ID NO: 130 - protein, 10 aa, Artificial Sequence
  CDR-H1 (hz58E05v23)
GSTFSDYHMS

SEQ ID NO: 131 - protein, 10 aa, Artificial Sequence
  CDR-H1 (hz58E05v24)
GSTFSRYHMS

SEQ ID NO: 132 - protein, 10 aa, Artificial Sequence
  CDR-H1 (hz58E05v47)
GSTFSIYHMS

SEQ ID NO: 133 - protein, 10 aa, Artificial Sequence
  CDR-H1 (hz58E05v48)
GFTFSSYHMS

SEQ ID NO: 134 - protein, 10 aa, Artificial Sequence
  CDR-H1 (cx3969 pPl2-B7H3-1359-1A10 xELL)
GLTFDEHHMG

SEQ ID NO: 135 - protein, 10 aa, Artificial Sequence
  CDR-H1 (cx3982 pPl2-B7H3-1675-1E4 xELL)
GSSFGSNVMM

SEQ ID NO: 136 - protein, 10 aa, Artificial Sequence
  CDR-H1 (cx3218 pPl2-B7H3 avi-D9-xELL)
GFTFASTGMS

SEQ ID NO: 137 - protein, 10 aa, Artificial Sequence
  CDR-H1 (cx3219 pPl2-B7H3 avi-A3-xELL)
GFTFASYGMS

SEQ ID NO: 138 - protein, 10 aa, Artificial Sequence
  CDR-H1 (synthetic E9, synthetic B4)
GRTFSSYAMS

SEQ ID NO: 139 - protein, 10 aa, Artificial Sequence
  CDR-H1 (pPL2-B7H3 VHH-9 (57B06) IgG1, pPL2-B7H3 VHH-7 (57A12) IgG1, L57B06, h57B06v5,6,7,8)
GGTFSSYAMG

SEQ ID NO: 140 - protein, 10 aa, Artificial Sequence
  CDR-H1 (pPL2-B7H3 VHH-12 (57B10) IgG1)
GSIPSIDHMG

SEQ ID NO: 141 - protein, 10 aa, Artificial Sequence
  CDR-H1 (pPL2-B7H3 VHH-54 (58B06) IgG1)
GRSFSTYAMG

SEQ ID NO: 142 - protein, 10 aa, Artificial Sequence
  CDR-H1 (pPL2-B7H3 VHH-10 (57B08) IgG1)
GLTFSSYAMG

SEQ ID NO: 143 - protein, 10 aa, Artificial Sequence
  CDR-H1 (pPL2-B7H3 VHH-53 (58A08) IgG1)
GRTFSSLAVG

SEQ ID NO: 144 - protein, 10 aa, Artificial Sequence
  CDR-H1 (pPl2-B7H3 VHH 57D1c-IgG1)
GHTFSTYAMG

SEQ ID NO: 145 - protein, 10 aa, Artificial Sequence
  CDR-H1 (1H5, hz1H5v1,2,3,4)
GRSFGDYTVG

SEQ ID NO: 146 - protein, 10 aa, Artificial Sequence
  CDR-H2 (hz1A5v1,2,3,7,8,12,24,25,28,29,34,35,36,37,38,39, 40)
TIYSSGTGTF

SEQ ID NO: 147 - protein, 10 aa, Artificial Sequence
  CDR-H2 (hz1A5v9,17,33,41,42,43,45,46,47,49)
TIYSRGTGTF

SEQ ID NO: 148 - protein, 10 aa, Artificial Sequence
  CDR-H2 (hz1A5v30)
TIYSRGGSTF

SEQ ID NO: 149 - protein, 10 aa, Artificial Sequence
  CDR-H2 (hz1A5v31)
TIYSSGTGTY

SEQ ID NO: 150 - protein, 10 aa, Artificial Sequence
  CDR-H2 (hz1A5v32)
TIYSRGGSTY

SEQ ID NO: 151 - protein, 10 aa, Artificial Sequence
  CDR-H2 (hz1A5v44,48,50)
TIYSRGTGTY

SEQ ID NO: 152 - protein, 10 aa, Artificial Sequence
  CDR-H2 (L57B04, hz57B04v3,4,8,9,23)
VVNWSGGSKY

SEQ ID NO: 153 - protein, 10 aa, Artificial Sequence
  CDR-H2 (hz57B04v15,20,24)
VVNWGGGSKY

SEQ ID NO: 154 - protein, 9 aa, Artificial Sequence
  CDR-H2 (L58E05, hz58E05v1,2,3,4,5,6,7,8,9,10,11,13,16,18,19,20,21, 22,23,2,2,26,27,28,29,30,31,32,36,37,38,39,40,41,4 2,43,44,45,46,47,48,49,50,51,52,53,54)
TSHHGGTTN

SEQ ID NO: 155 - protein, 10 aa, Artificial Sequence
  CDR-H2 (cx3969 pPl2-B7H3-1359-1A10 xELL)
AITWHTGTTW

SEQ ID NO: 156 - protein, 10 aa, Artificial Sequence
  CDR-H2 (cx3982 pPl2-B7H3-1675-1E4 xELL)
TINSSGTGTF

SEQ ID NO: 157 - protein, 10 aa, Artificial Sequence
  CDR-H2 (cx3218 pPl2-B7H3 avi-D9-xELL)
SINSGSDSTM

SEQ ID NO: 158 - protein, 10 aa, Artificial Sequence
  CDR-H2 (GFTFASYGMS)
SINSGSDTSM

SEQ ID NO: 159 - protein, 10 aa, Artificial Sequence
  CDR-H2 (synthetic E9)
TITSSGSTTY

SEQ ID NO: 160 - protein, 10 aa, Artificial Sequence
  CDR-H2 (synthetic B4)
TITTGGGTTY

SEQ ID NO: 161 - protein, 10 aa, Artificial Sequence
  CDR-H2 (pPL2-B7H3 VHH-9 (57B06) IgG1, pPL2-B7H3 VHH-7 (57A12) IgG1, L57B06, h57B06v5,6,7,8)
AISSEGGSTY

SEQ ID NO: 162 - protein, 9 aa, Artificial Sequence
  CDR-H2 (pPL2-B7H3 VHH-12 (57B10) IgG1)
SIDLNGRTN

SEQ ID NO: 163 - protein, 10 aa, Artificial Sequence
  CDR-H2 (pPL2-B7H3 VHH-54 (58B06) IgG1)
AVGWRGTNTY

SEQ ID NO: 164 - protein, 10 aa, Artificial Sequence
  CDR-H2 (pPL2-B7H3 VHH-10 (57B08) IgG1)
AISWSGGNTL

SEQ ID NO: 165 - protein, 10 aa, Artificial Sequence
  CDR-H2 (pPL2-B7H3 VHH-53 (58A08) IgG1)
AISWSGGNTY

SEQ ID NO: 166 - protein, 10 aa, Artificial Sequence
  CDR-H2 (pPl2-B7H3 VHH 57D1c-IgG1)
GITRSGDSTH

SEQ ID NO: 167 - protein, 10 aa, Artificial Sequence
  CDR-H2 (1H5, hz1H5v1,2,3,4)
GLSWLGGTIY

SEQ ID NO: 168 - protein, 9 aa, Artificial Sequence
  CDR-H3 (L1A5, hz1A5v1,2,3,7,8,9,12,17,24,25,28,29,30,31,32,33,34 ,35,36,37,39,40,41,42,43,44,45,46,47,48,49,50,cx39 82 pPl2-B7H3-1675-1E4 xELL)
SGPVRGWGP

SEQ ID NO: 169 - protein, 9 aa, Artificial Sequence
  CDR-H3 (hz1A5v38)
SGPVRGWGY

SEQ ID NO: 170 - protein, 16 aa, Artificial Sequence
  CDR-H3 (L57B04, hz57B04v3,4,8,9,15,23,24)
GGAYSGPYYDTRQYTY

SEQ ID NO: 171 - protein, 16 aa, Artificial Sequence
  CDR-H3 (hz57B04v20)
GGAYSTPYYDTRQYTY

SEQ ID NO: 172 - protein, 9 aa, Artificial Sequence
  CDR-H3 (L58E05, hz58E05v1,2,3,4,8,28,29,30)
DHGYNGRGY

SEQ ID NO: 173 - protein, 9 aa, Artificial Sequence
  CDR-H3 (hz58E05v5,9,13,16,18,19,20,21,22,23,24,25,26,27,3 1,32,48,49,50,51,52,53,54)
DHGYQGRGY

SEQ ID NO: 174 - protein, 9 aa, Artificial Sequence
  CDR-H3 (hz58E05v6)
DHGYNARGY

SEQ ID NO: 175 - protein, 9 aa, Artificial Sequence
  CDR-H3 (hz58E05v7,11)
DHGYNTRGY

SEQ ID NO: 176 - protein, 9 aa, Artificial Sequence
  CDR-H3 (hz58E05v36,44,47)
DHGYGGRGY

SEQ ID NO: 177 - protein, 9 aa, Artificial Sequence
  CDR-H3 (hz58E05v37)
DHGYSGRGY

SEQ ID NO: 178 - protein, 9 aa, Artificial Sequence
  CDR-H3 (hz58E05v38)
DHGYVGRGY

SEQ ID NO: 179 - protein, 9 aa, Artificial Sequence
  CDR-H3 (hz58E05v39,45)
DHGYEGRGY

SEQ ID NO: 180 - protein, 9 aa, Artificial Sequence
  CDR-H3 (hz58E05v40)
DHGYNPRGY

SEQ ID NO: 181 - protein, 9 aa, Artificial Sequence
  CDR-H3 (hz58E05v41)
DHGYGNRGY

SEQ ID NO: 182 - protein, 9 aa, Artificial Sequence
  CDR-H3 (hz58E05v42,46)
DHGNYGRGY

SEQ ID NO: 183 - protein, 9 aa, Artificial Sequence
  CDR-H3 (hz58E05v43)
DHGYNRGGY

SEQ ID NO: 184 - protein, 16 aa, Artificial Sequence
  CDR-H3 (cx3969 pPl2-B7H3-1359-1A10 xELL)
GRRPFFIREVGVEPDY

SEQ ID NO: 185 - protein, 16 aa, Artificial Sequence
  CDR-H3 (cx3218 pPl2-B7H3 avi-D9-xELL)
WALSCSGYGCDDLPQD

SEQ ID NO: 186 - protein, 16 aa, Artificial Sequence
  CDR-H3 (cx3219 pPl2-B7H3 avi-A3-xELL)
WALSCSQYGCDDLPRP

SEQ ID NO: 187 - protein, 9 aa, Artificial Sequence
  CDR-H3 (synthetic E9)
YTSRTVRDY

SEQ ID NO: 188 - protein, 9 aa, Artificial Sequence
  CDR-H3 (synthetic B4)
YTSRFPRDY

SEQ ID NO: 189 - protein, 14 aa, Artificial Sequence
  CDR-H3 (pPL2-B7H3 VHH-7 (57A12) IgG1)
KGVGWPQEQASYDY

SEQ ID NO: 190 - protein, 534 aa, Homo sapiens
  B7H3
MLRRRGSPGMGVHVGAALGALWFCLTGALEVQVPEDPVVALVGTDATLCCSFSPEPGFSLAQLNLIWQLTDTKQLVHSFAEGQDQGSAYANRTALFPDLLAQGNASLRLQRVRVADEGSFTCFVSIRDFGSAAVSLQVAAPYSKPSMTLEPNKDLRPGDTVTITCSSYQGYPEAEVFWQDGQGVPLTGNVTTSQMANEQGLFDVHSILRVVLGANGTYSCLVRNPVLQQDAHSSVTITPQRSPTGAVEVQVPEDPVVALVGTDATLRCSFSPEPGFSLAQLNLIWQLTDTKQLVHSFTEGRDQGSAYANRTALFPDLLAQGNASLRLQRVRVADEGSFTCFVSIRDFGSAAVSLQVAAPYSKPSMTLEPNKDLRPGDTVTITCSSYRGYPEAEVFWQDGQGVPLTGNVTTSQMANEQGLFDVHSVLRVVLGANGTYSCLVRNPVLQQDAHGSVTITGQPMTFPPEALWVTVGLSVCLIALLVALAFVCWRKIKQSCEEENAGAEDQDGEGEGSKTALQPLKHSDSKEDDGQEIA

SEQ ID NO: 191 - protein, 6 aa, Artificial Sequence
  (GGS)2 linker
GGSGGS

SEQ ID NO: 192 - protein, 9 aa, Artificial Sequence
  (GGS)3  linker
GGSGGSGGS

SEQ ID NO: 193 - protein, 12 aa, Artificial Sequence
  (GGS)4 linker
GGSGGSGGSGGS

SEQ ID NO: 194 - protein, 15 aa, Artificial Sequence
  (GGS)5 linker
GGSGGSGGSGGSGGS

SEQ ID NO: 195 - protein, 4 aa, Artificial Sequence
  glycine linker
GGGG

SEQ ID NO: 196 - protein, 5 aa, Artificial Sequence
  glycine linker
GGGGG

SEQ ID NO: 197 - protein, 6 aa, Artificial Sequence
  glycine linker
GGGGGG

SEQ ID NO: 198 - protein, 218 aa, Homo sapiens
  human IgG1 Fc
PAPELLGGPSVFLFPPKPKDTLMISRTPEVTCVVVDVSHEDPEVKFNWYVDGVEVHNAKTKPREEQYNSTYRVVSVLTVLHQDWLNGKEYKCKVSNKALPAPIEKTISKAKGQPREPQVYTLPPSRDELTKNQVSLTCLVKGFYPSDIAVEWESNGQPENNYKTTPPVLDSDGSFFLYSKLTVDKSRWQQGNVFSCSVMHEALHNHYTQKSLSLSPGK

SEQ ID NO: 199 - protein, 215 aa, Artificial Sequence
  Fc xELL
PAPGGPSVFLFPPKPKDTLMISRTPEVTCVVVDVSHEDPEVKFNWYVDGVEVHNAKTKPREEQYNSTYRVVSVLTVLHQDWLNGKEYKCKVSNKALPAPIEKTISKAKGQPREPQVYTLPPSRDELTKNQVSLTCLVKGFYPSDIAVEWESNGQPENNYKTTPPVLDSDGSFFLYSKLTVDKSRWQQGNVFSCSVMHEALHNHYTQKSLSLSPGK

SEQ ID NO: 200 - protein, 217 aa, Homo sapiens
  human IgG2 Fc
PAPPVAGPSVFLFPPKPKDTLMISRTPEVTCVVVDVSHEDPEVQFNWYVDGVEVHNAKTKPREEQFNSTFRVVSVLTVVHQDWLNGKEYKCKVSNKGLPAPIEKTISKTKGQPREPQVYTLPPSREEMTKNQVSLTCLVKGFYPSDISVEWESNGQPENNYKTTPPMLDSDGSFFLYSKLTVDKSRWQQGNVFSCSVMHEALHNHYTQKSLSLSPGK

SEQ ID NO: 201 - protein, 218 aa, Homo sapiens
  human IgG3 Fc
PAPELLGGPSVFLFPPKPKDTLMISRTPEVTCVVVDVSHEDPEVQFKWYVDGVEVHNAKTKPREEQYNSTFRVVSVLTVLHQDWLNGKEYKCKVSNKALPAPIEKTISKTKGQPREPQVYTLPPSREEMTKNQVSLTCLVKGFYPSDIAVEWESSGQPENNYNTTPPMLDSDGSFFLYSKLTVDKSRWQQGNIFSCSVMHEALHNRFTQKSLSLSPGK

SEQ ID NO: 202 - protein, 218 aa, Homo sapiens
  human IgG4 Fc
PAPEFLGGPSVFLFPPKPKDTLMISRTPEVTCVVVDVSQEDPEVQFNWYVDGVEVHNAKTKPREEQFNSTYRVVSVLTVLHQDWLNGKEYKCKVSNKGLPSSIEKTISKAKGQPREPQVYTLPPSQEEMTKNQVSLTCLVKGFYPSDIAVEWESNGQPENNYKTTPPVLDSDGSFFLYSRLTVDKSRWQEGNVFSCSVMHEALHNHYTQKSLSLSLGK

SEQ ID NO: 203 - protein, 218 aa, Homo sapiens
  human IgG4 Fc
PAPELLGGPSVFLFPPKPKDTLMISRTPEVTCVVVDVSQEDPEVQFNWYVDGVEVHNAKTKPREEQFNSTYRVVSVLTVLHQDWLNGKEYKCKVSNKGLPSSIEKTISKAKGQPREPQVYTLPPSQEEMTKNQVSLTCLVKGFYPSDIAVEWESNGQPENNYKTTPPVLDSDGSFFLYSRLTVDKSRWQEGNVFSCSVMHEALHNHYTQKSLSLSLGK

SEQ ID NO: 204 - protein, 14 aa, Artificial Sequence
  modified IgG1 hinge
EPKSSDKTHTCPPC

SEQ ID NO: 205 - protein, 9 aa, Artificial Sequence
  truncated IgG1 hinge
DKTHTCPPC

SEQ ID NO: 206 - protein, 11 aa, Artificial Sequence
  modified IgG4 hinge
ESKYGPPCPPC

SEQ ID NO: 207 - protein, 12 aa, Artificial Sequence
  carboxy-terminal sequence
GQGTLVTVKPGG

SEQ ID NO: 208 - protein, 12 aa, Artificial Sequence
  carboxy-terminal sequence
GQGTLVTVEPGG

SEQ ID NO: 209 - protein, 119 aa, Artificial Sequence [sequence omitted]

SEQ ID NO: 210 - protein, 106 aa, Artificial Sequence [sequence omitted]

SEQ ID NO: 211 - protein, 119 aa, Artificial Sequence
  OKT3 humanized VH
QVQLVQSGGGVVQPGRSLRLSCKASGYTFTRYTMHWVRQAPGKGLEWIGYINPSRGYTNYNQKVKDRFTISRDNSKNTAFLQMDSLRPEDTGVYFCARYYDDHYSLDYWGQGTPVTVSS

SEQ ID NO: 212 - protein, 119 aa, Artificial Sequence
  OKT3 humanized VH
DVQLVQSGAEVKKPGASVKVSCKASGYTFTRYTMHWVRQAPGQGLEWIGYINPSRGYTNYADSVKGRFTITTDKSTSTAYMELSSLRSEDTATYYCARYYDDHYCLDYWGQGTTVTVSS

SEQ ID NO: 213 - protein, 119 aa, Artificial Sequence
  OKT3 humanized VH
QVQLVQSGAELKKPGASVKVSCKASGYTFTRYTMHWVRQAPGQCLEWMGYINPSRGYTNYNQKFKDKATLTADKSTSTAYMELRSLRSDDTAVYYCARYYDDHYSLDYWGQGTLVTVSS

SEQ ID NO: 214 - protein, 106 aa, Artificial Sequence [sequence omitted]

SEQ ID NO: 215 - protein, 106 aa, Artificial Sequence
  OKT3 humanized VL
DIQMTQSPSSLSASVGDRVTITCRASQSVSYMNWYQQKPGKAPKRWIYDTSKVASGVPARFSGSGSGTDYSLTINSLEAEDAATYYCQQWSSNPLTFGGGTKVEIK

SEQ ID NO: 216 - protein, 108 aa, Artificial Sequence
  OKT3 humanized VL
DIQLTQSPSILSASVGDRVTITCRASSSVSYMNWYQQKPGKAPKRWIYDTSKVASGVPYRFSGSGSGTEYTLTISSMQPEDFATYYCQQWSSNPLTFGCGTKVEIKRT

SEQ ID NO: 217 - protein, 125 aa, Artificial Sequence
  anti-CD3 Hv
EVQLVESGGGLVQPKGSLKLSCAASGFTFNTYAMNWVRQAPGKGLEWVARIRSKYNNYATYYADSVKDRFTISRDDSQSILYLQMNNLKTEDTAMYYCVRHGNFGNSYVSWFAYWGQGTLVTVSA

SEQ ID NO: 218 - protein, 109 aa, Artificial Sequence
  anti-CD3 Lv
QAVVTQESALTTSPGETVTLTCRSSTGAVTTSNYANWVQEKPDHLFTGLIGGTNKRAPGVPARFSGSLIGDKAALTITGAQTEDEAIYFCALWYSNLWVFGGGTKLTVL

SEQ ID NO: 219 - protein, 5 aa, Artificial Sequence
  anti-CD3 VH CDR1
TYAMN

SEQ ID NO: 220 - protein, 19 aa, Artificial Sequence
  anti-CD3 VH CDR2
RIRSKYNNYATYYADSVKD

SEQ ID NO: 221 - protein, 14 aa, Artificial Sequence
  anti-CD3 VH CDR3
HGNFGNSYVSWFAY

SEQ ID NO: 222 - protein, 14 aa, Artificial Sequence
  anti-CD3 VL CDR1
RSSTGAVTTSNYAN

SEQ ID NO: 223 - protein, 7 aa, Artificial Sequence
  anti-CD3 VL CDR2
GTNKRAP

SEQ ID NO: 224 - protein, 9 aa, Artificial Sequence
  anti-CD3 VL CDR3
ALWYSNLWV

SEQ ID NO: 225 - protein, 125 aa, Artificial Sequence
  anti-CD3 VH1
EVQLVESGGGLVQPGGSLRLSCAASGFTFSTYAMNWVRQAPGKGLEWVGRIRSKYNNYATYYADSVKDRFTISRDDSKNSLYLQMNSLKTEDTAVYYCVRHGNFGNSYVSWFAYWGQGTLVTVSS

SEQ ID NO: 226 - protein, 125 aa, Artificial Sequence
  anti-CD3 VH2
EVKLVESGGGLVQPGGSLRLSCAASGFTFNTYAMNWVRQAPGKGLEWVARIRSKYNNYATYYADSVKDRFTISRDDSKSSLYLQMNNLKTEDTAMYYCVRHGNFGNSYVSWFAYWGQGTLVTVSS

SEQ ID NO: 227 - protein, 125 aa, Artificial Sequence
  anti-CD3 VH3
EVKLVESGGGLVKPGRSLRLSCAASGFTFNTYAMNWVRQAPGKGLEWVARIRSKYNNYATYYADSVKDRFTISRDDSKSILYLQMNNLKTEDTAMYYCVRHGNFGNSYVSWFAYWGQGTLVTVSS

SEQ ID NO: 228 - protein, 125 aa, Artificial Sequence
  anti-CD3 VH4
EVKLVESGGGLVKPGRSLRLSCAASGFTFNTYAMNWVRQAPGKGLEWVARIRSKYNNYATYYADSVKDRFTISRDDSKSILYLQMNSLKTEDTAMYYCVRHGNFGNSYVSWFAYWGQGTLVTVSS

SEQ ID NO: 229 - protein, 125 aa, Artificial Sequence; identical to SEQ ID NO: 228
  anti-CD3 VH5

SEQ ID NO: 230 - protein, 125 aa, Artificial Sequence
  anti-CD3 VH6
EVQLLESGGGLVQPGGSLRLSCAASGFTFSTYAMNWVRQAPGKGLEWVSRIRSKYNNYATYYADSVKGRFTISRDDSKNTLYLQMNSLRAEDTAVYYCVRHGNFGNSYVSWFAYWGQGTLVTVSS

SEQ ID NO: 231 - protein, 125 aa, Artificial Sequence
  anti-CD3 VH7
EVQLVESGGGLVQPGGSLRLSCAASGFTFSTYAMSWVRQAPGKGLEWVGRIRSKYNNYATYYADSVKGRFTISRDDSKNTLYLQMNSLRAEDTAVYYCVRHGNFGDSYVSWFAYWGQGTLVTVSS

SEQ ID NO: 232 - protein, 124 aa, Artificial Sequence
  anti-CD3 VH8
EVQLVESGGGLVQPGGSLKLSCAASGFTFNKYAMNWVRQAPGKGLEWVARIRSKYNNYATYYADSVKDRFTISRDDSKNTAYLQMNNLKTEDTAVYYCVRHGNFGNSYISYWAYWGQGTLVTVS

SEQ ID NO: 233 - protein, 125 aa, Artificial Sequence
  anti-CD3 VH9
EVQLVESGGGLVQPGGSLRLSCAASGFTFNTYAMNWVRQAPGKGLEWVARIRSKYNNYATYYADSVKGRFTISRDDSKNTLYLQMNSLRAEDTAVYYCVRHGNFGNSYVSWFAYWGQGTTVTVSS

SEQ ID NO: 234 - protein, 125 aa, Artificial Sequence
  anti-CD3 VH10
EVQLVESGGGLVQPGGSLRLSCAASGFTFNTYAMNWVRQAPGKGLEWVARIRSKYNNYATYYADSVKGRFTISRDDSKNTLYLQMNSLRAEDTAVYYCVRHGNFGNSYVSYFAYWGQGTTVTVSS

SEQ ID NO: 235 - protein, 125 aa, Artificial Sequence
  anti-CD3 VH11
EVQLVESGGGLVQPKGSLKLSCAASGFTFNTYAMNWVRQAPGKGLEWVARIRSKYNNYATYYADSVKDRFTISRDDSQSILYLQMNNLKTEDTAMYYCVRHGNFGNSYVSWFAYWGQGTLVTVSS

SEQ ID NO: 236 - protein, 125 aa, Artificial Sequence
  anti-CD3 VH12
EVQLVESGGGLVQPGGSLRLSCAASGFTFNTYAMNWVRQAPGKGLEWVARIRSKYNNYATYYADSVKGRFTISRDDAKNTLYLQMSSLRAEDTAVYYCVRHGNFGNSYVSWFAYWGQGTLVTVKP

SEQ ID NO: 237 - protein, 125 aa, Artificial Sequence
  anti-CD3 VH13
EVQLVESGGGLVQPGGSLRLSCAASGFTFNTYAMNWVRQAPGKCLEWVARIRSKYNNYATYYADSVKGRFTISRDDAKNTLYLQMSSLRAEDTAVYYCVRHGNFGNSYVSWFAYWGQGTLVTVKP

SEQ ID NO: 238 - protein, 125 aa, Artificial Sequence
  anti-CD3 VH14
EVQLVESGGGLVQPGGSLRLSCAASGFTFNTYAMNWVRQAPGKGLEWVARIRSKYNNYATYYADSVKGRFTISRDDAKNTLYLQMSSLRAEDTAVYYCVRHGNFGNSYVSWFAYWGCGTLVTVKP

SEQ ID NO: 239 - protein, 125 aa, Artificial Sequence
  anti-CD3 VH15
EVQLVESGGGLVQPGGSLRLSCAASGFTFSTYAMNWVRQAPGKGLEWVARIRSKYNNYATYYADSVKGRFTISRDDAKNTLYLQMSSLRAEDTAVYYCVRHGNFGNSYVSWFAYWGQGTLVTVSS

SEQ ID NO: 240 - protein, 125 aa, Artificial Sequence
  anti-CD3 VH16
EVQLVESGGGLVQPGGSLRLSCAASGFTFNTYAMNWVRQAPGKGLEWVSRIRSKYNNYATYYADSVKGRFTISRDDAKNTLYLQMSSLRAEDTAVYYCVRHGNFGNSYVSWFAYWGQGTLVTVSS

SEQ ID NO: 241 - protein, 125 aa, Artificial Sequence
  anti-CD3 VH17
EVQLVESGGGLVQPGGSLRLSCAASGFTFSTYAMNWVRQAPGKGLEWVSRIRSKYNNYATYYADSVKGRFTISRDDAKNTLYLQMSSLRAEDTAVYYCVRHGNFGNSYVSWFAYWGQGTLVTVSS

SEQ ID NO: 242 - protein, 125 aa, Artificial Sequence
  anti-CD3 VH18
EVQLVESGGGLVQPGGSLRLSCAASGFTFSTYAMNWVRQAPGKCLEWVARIRSKYNNYATYYADSVKGRFTISRDDAKNTLYLQMSSLRAEDTAVYYCVRHGNFGNSYVSWFAYWGQGTLVTVSS

SEQ ID NO: 243 - protein, 125 aa, Artificial Sequence
  anti-CD3 VH19
EVQLVESGGGLVQPGGSLRLSCAASGFTFNTYAMNWVRQAPGKCLEWVSRIRSKYNNYATYYADSVKGRFTISRDDAKNTLYLQMSSLRAEDTAVYYCVRHGNFGNSYVSWFAYWGQGTLVTVSS

SEQ ID NO: 244 - protein, 125 aa, Artificial Sequence
  anti-CD3 VH20
EVQLVESGGGLVQPGGSLRLSCAASGFTFSTYAMNWVRQAPGKCLEWVSRIRSKYNNYATYYADSVKGRFTISRDDAKNTLYLQMSSLRAEDTAVYYCVRHGNFGNSYVSWFAYWGQGTLVTVSS

SEQ ID NO: 245 - protein, 125 aa, Artificial Sequence
  anti-CD3 VH21
EVQLVESGGGLVQPGGSLRLSCAASGFTFSTYAMNWVRQAPGKCLEWVGRIRSKYNNYATYYADSVKDRFTISRDDSKNSLYLQMNSLKTEDTAVYYCVRHGNFGNSYVSWFAYWGQGTLVTVSS

SEQ ID NO: 246 - protein, 125 aa, Artificial Sequence
  anti-CD3 VH22
EVKLVESGGGLVQPGGSLRLSCAASGFTFNTYAMNWVRQAPGKCLEWVARIRSKYNNYATYYADSVKDRFTISRDDSKSSLYLQMNNLKTEDTAMYYCVRHGNFGNSYVSWFAYWGQGTLVTVSS

SEQ ID NO: 247 - protein, 125 aa, Artificial Sequence
  anti-CD3 VH23
EVKLVESGGGLVKPGRSLRLSCAASGFTFNTYAMNWVRQAPGKCLEWVARIRSKYNNYATYYADSVKDRFTISRDDSKSILYLQMNNLKTEDTAMYYCVRHGNFGNSYVSWFAYWGQGTLVTVSS

SEQ ID NO: 248 - protein, 125 aa, Artificial Sequence
  anti-CD3 VH24
EVKLVESGGGLVKPGRSLRLSCAASGFTFNTYAMNWVRQAPGKCLEWVARIRSKYNNYATYYADSVKDRFTISRDDSKSILYLQMNSLKTEDTAMYYCVRHGNFGNSYVSWFAYWGQGTLVTVSS

SEQ ID NO: 249 - protein, 125 aa, Artificial Sequence; identical to SEQ ID NO: 248
  anti-CD3 VH25

SEQ ID NO: 250 - protein, 125 aa, Artificial Sequence
  anti-CD3 VH26
EVQLLESGGGLVQPGGSLRLSCAASGFTFSTYAMNWVRQAPGKCLEWVSRIRSKYNNYATYYADSVKGRFTISRDDSKNTLYLQMNSLRAEDTAVYYCVRHGNFGNSYVSWFAYWGQGTLVTVSS

SEQ ID NO: 251 - protein, 125 aa, Artificial Sequence
  anti-CD3 VH27
EVQLVESGGGLVQPGGSLRLSCAASGFTFSTYAMSWVRQAPGKCLEWVGRIRSKYNNYATYYADSVKGRFTISRDDSKNTLYLQMNSLRAEDTAVYYCVRHGNFGDSYVSWFAYWGQGTLVTVSS

SEQ ID NO: 252 - protein, 124 aa, Artificial Sequence
  anti-CD3 VH28
EVQLVESGGGLVQPGGSLKLSCAASGFTFNKYAMNWVRQAPGKCLEWVARIRSKYNNYATYYADSVKDRFTISRDDSKNTAYLQMNNLKTEDTAVYYCVRHGNFGNSYISYWAYWGQGTLVTVS

SEQ ID NO: 253 - protein, 125 aa, Artificial Sequence
  anti-CD3 VH29
EVQLVESGGGLVQPGGSLRLSCAASGFTFNTYAMNWVRQAPGKCLEWVARIRSKYNNYATYYADSVKGRFTISRDDSKNTLYLQMNSLRAEDTAVYYCVRHGNFGNSYVSWFAYWGQGTTVTVSS

SEQ ID NO: 254 - protein, 125 aa, Artificial Sequence
  anti-CD3 VH30
EVQLVESGGGLVQPGGSLRLSCAASGFTFNTYAMNWVRQAPGKCLEWVARIRSKYNNYATYYADSVKGRFTISRDDSKNTLYLQMNSLRAEDTAVYYCVRHGNFGNSYVSYFAYWGQGTTVTVSS

SEQ ID NO: 255 - protein, 125 aa, Artificial Sequence
  anti-CD3 VH31
EVQLVESGGGLVQPKGSLKLSCAASGFTFNTYAMNWVRQAPGKCLEWVARIRSKYNNYATYYADSVKDRFTISRDDSQSILYLQMNNLKTEDTAMYYCVRHGNFGNSYVSWFAYWGQGTLVTVSS

SEQ ID NO: 256 - protein, 109 aa, Artificial Sequence; identical to SEQ ID NO: 218
  anti-CD3 VL1

SEQ ID NO: 257 - protein, 109 aa, Artificial Sequence
  anti-CD3 VL2
QAVVTQEPSLTVSPGGTVTLTCGSSTGAVTTSNYANWVQQKPGKSPRGLIGGTNKRAPGVPARFSGSLLGGKAALTISGAQPEDEADYYCALWYSNHWVFGCGTKLEIK

SEQ ID NO: 258 - protein, 109 aa, Artificial Sequence
  anti-CD3 VL3
QAVVTQEPSLTVSPGGTVTLTCRSSTGAVTTSNYANWVQQKPGQAPRGLIGGTNKRAPWTPARFSGSLLGGKAALTITGAQAEDEADYYCALWYSNLWVFGGGTKLTVL

SEQ ID NO: 259 - protein, 109 aa, Artificial Sequence
  anti-CD3 VL4
QAVVTQEPSFSVSPGGTVTLTCRSSTGAVTTSNYANWVQQTPGQAFRGLIGGTNKRAPGVPARFSGSLIGDKAALTITGAQADDESIYFCALWYSNLWVFGGGTKLTVL

SEQ ID NO: 260 - protein, 109 aa, Artificial Sequence
  anti-CD3 VL5
QAVVTQEPSFSVSPGGTVTLTCRSSTGAVTTSNYANWVQQTPGQAFRGLIGGTNKRAPGVPARFSGSILGNKAALTITGAQADDESIYFCALWYSNLWVFGGGTKLTVL

SEQ ID NO: 261 - protein, 109 aa, Artificial Sequence
  anti-CD3 VL6
QAVVTQEPSFSVSPGGTVTLTCRSSTGAVTTSNYANWVQQTPGQAFRGLIGGTNKRAPGVPARFSGSILGNKAALTITGAQADDESDYYCALWYSNLWVFGGGTKLTVL

SEQ ID NO: 262 - protein, 109 aa, Artificial Sequence
  anti-CD3 VL7
QAVVTQEPSLTVSPGGTVTLTCGSSTGAVTTSNYANWVQEKPGQAFRGLIGGTNKRAPGTPARFSGSLLGGKAALTLSGAQPEDEAEYYCALWYSNLWVFGGGTKLTVL

SEQ ID NO: 263 - protein, 109 aa, Artificial Sequence
  anti-CD3 VL8
QTVVTQEPSLTVSPGGTVTLTCGSSTGAVTSGNYPNWVQQKPGQAPRGLIGGTKFLAPGTPARFSGSLLGGKAALTLSGVQPEDEAEYYCVLWYSNRWVFGGGTKLTVL

SEQ ID NO: 264 - protein, 109 aa, Artificial Sequence
  anti-CD3 VL9
QAVVTQEPSLTVSPGGTVTLTCGSSTGAVTTSNYANWVQQKPGQAFRGLIGGTNKRAPGVPARFSGSLLGGKAALTISGAQPEDEADYYCALWYSNHWVFGGGTKLEIK

SEQ ID NO: 265 - protein, 109 aa, Artificial Sequence
  anti-CD3 VL10
QAVVTQEPSLTVSPGGTVTLTCGSSTGAVTTSNYANWVQQKPGQAFRGLIGGTNKRAPGVPARFSGSLLGGKAALTISGAQPEDEADYYCALWYSNHWVFGCGTKLEIK

SEQ ID NO: 266 - protein, 109 aa, Artificial Sequence
  anti-CD3 VL11
QAVVTQEPSLTVSPGGTVTLTCGSSTGAVTTSNYANWVQQKPGQCFRGLIGGTNKRAPGVPARFSGSLLGGKAALTISGAQPEDEADYYCALWYSNHWVFGEGTKLEIK

SEQ ID NO: 267 - protein, 109 aa, Artificial Sequence
  anti-CD3 VL12
QAVVTQESALTTSPGETVTLTCRSSTGAVTTSNYANWVQEKPDHLFTGLIGGTNKRAPGVPARFSGSLIGDKAALTITGAQTEDEAIYFCALWYSNLWVFGCGTKLTVL

SEQ ID NO: 268 - protein, 109 aa, Artificial Sequence
  anti-CD3 VL13
QAVVTQEPSLTVSPGGTVTLTCGSSTGAVTTSNYANWVQQKPGKSPRGLIGGTNKRAPGVPARFSGSLLGGKAALTISGAQPEDEADYYCALWYSNHWVFGGGTKLEIK

SEQ ID NO: 269 - protein, 109 aa, Artificial Sequence
  anti-CD3 VL14
QAVVTQEPSLTVSPGGTVTLTCRSSTGAVTTSNYANWVQQKPGQAPRGLIGGTNKRAPWTPARFSGSLLGGKAALTITGAQAEDEADYYCALWYSNLWVFGCGTKLTVL

SEQ ID NO: 270 - protein, 109 aa, Artificial Sequence; identical to SEQ ID NO: 259
  anti-CD3 VL15

SEQ ID NO: 271 - protein, 109 aa, Artificial Sequence
  anti-CD3 VL16
QAVVTQEPSFSVSPGGTVTLTCRSSTGAVTTSNYANWVQQTPGQAFRGLIGGTNKRAPGVPARFSGSILGNKAALTITGAQADDESIYFCALWYSNLWVFGCGTKLTVL

SEQ ID NO: 272 - protein, 109 aa, Artificial Sequence
  anti-CD3 VL17
QAVVTQEPSFSVSPGGTVTLTCRSSTGAVTTSNYANWVQQTPGQAFRGLIGGTNKRAPGVPARFSGSILGNKAALTITGAQADDESDYYCALWYSNLWVFGCGTKLTVL

SEQ ID NO: 273 - protein, 109 aa, Artificial Sequence
  anti-CD3 VL18
QAVVTQEPSLTVSPGGTVTLTCGSSTGAVTTSNYANWVQEKPGQAFRGLIGGTNKRAPGTPARFSGSLLGGKAALTLSGAQPEDEAEYYCALWYSNLWVFGCGTKLTVL

SEQ ID NO: 274 - protein, 109 aa, Artificial Sequence
  anti-CD3 VL19
QTVVTQEPSLTVSPGGTVTLTCGSSTGAVTSGNYPNWVQQKPGQAPRGLIGGTKFLAPGTPARFSGSLLGGKAALTLSGVQPEDEAEYYCVLWYSNRWVFGCGTKLTVL

SEQ ID NO: 275 - protein, 129 aa, Artificial Sequence
  anti-CD3 VHH
QVQLQESGGGLVQAGGSLRLSCAASGRTFSNYHMGWFRQAPGKERELVAAISGSGGSTYYTDSVKGRFTISRNNAKNTMSLQMSNLKPEDTGVYYCTTPTEKGSSIDYWGQGTQVTVSSGRYPYDVPDY

SEQ ID NO: 276 - protein, 193 aa, Artificial Sequence
  UniProt No. P32970, CD70-ECD residues 39-193
MPEEGSGCSVRRRPYGCVLRAALVPLVAGLVICLVVCIQRFAQAQQQLPLESLGWDVAELQLNHTGPQQDPRLYWQGGPALGRSFLHGPELDKGQLRIHRDGIYMVHIQVTLAICSSTTASRHHPTTLAVGICSPASRSISLLRLSFHQGCTIASQRLTPLARGDTLCTNLTGTLLPSRNTDETFFGVQWVRP

SEQ ID NO: 277 - protein, 119 aa, Artificial Sequence
  CD70 VH
QVQLVESGGGVVQPGRSLRLSCAASGFTFSSYDMHWVRQAPGKGLEWVAVIWYDGSNKYYADSVKGRFTISRDNSKNTLYLQMNSLRAEDTAVYYCARGSGNWGFFDYWGQGTLVTVSS

SEQ ID NO: 278 - protein, 107 aa, Artificial Sequence
  CD70 VL
DIQMTQSPSSLSASVGDRVTITCRASQGISRWLAWYQQKPEKAPKSLIYAASSLQSGVPSRFSGSGSGTDFTLTISSLQPEDFATYYCQQYNTYPRTFGQGTKVEIK

SEQ ID NO: 279 - protein, 124 aa, Artificial Sequence
  ICOS sdAb
QVQLQQSGGGLVQPGGSLRLSCAASGSIFSINGMGWYRQAPGKERELVAGLTSGGSVTNYADSVKGRFTISRDNAKNTVYLQMNSLKPEDTAVYYCRAEIFTRTGENYYGMDYWGKGTQVTVKP

SEQ ID NO: 280 - protein, 124 aa, Artificial Sequence
  CD28 sdAb
EVQLVESGGGEVQPGGSLRLSCAASGRMFSNYAMGWFRQAPGKEREFVAAINYRRDAADYAESVKGRFTISRDNAKNTVYLQMNSLRAEDTAVYYCGFTYAGWASSRRDDYNYWGQGTLVTVKP

SEQ ID NO: 281 - protein, 112 aa, Artificial Sequence
  CD3zeta signaling domain
RVKFSRSADAPAYQQGQNQLYNELNLGRREEYDVLDKRRGRDPEMGGKPRRKNPQEGLYNELQKDKMAEAYSEIGMKGERRRGKGHDGLYQGLSTATKDTYDALHMQALPPR

SEQ ID NO: 282 - protein, 42 aa, Artificial Sequence
  4-1BB-derived costimulatory domain
KRGRKKLLYIFKQPFMRPVQTTQEEDGCSCRFPEEEEGGCEL

SEQ ID NO: 283 - protein, 40 aa, Artificial Sequence
  CD28-derived costimulatory domain
SKRSRLLHSDYMNMTPRRPGPTRKHYQPYAPPRDFAAYRS

SEQ ID NO: 284 - protein, 41 aa, Artificial Sequence
  CD28-derived costimulatory domain 2
RSKRSRLLHSDYMNMTPRRPGPTRKHYQPYAPPRDFAAYRS

SEQ ID NO: 285 - protein, 44 aa, Artificial Sequence
  CD28-derived costimulatory domain 3
FWVRSKRSRLLHSDYMNMTPRRPGPTRKHYQPYAPPRDFAAYRS

SEQ ID NO: 286 - protein, 71 aa, Artificial Sequence
  CD8-derived hinge and transmembrane domain
KPTTTPAPRPPTPAPTIASQPLSLRPEASRPAAGGAVHTRGLDFASDIYIWAPLAGTCGVLLLSLVITLYC

SEQ ID NO: 287 - protein, 69 aa, Artificial Sequence
  CD8-derived hinge and transmembrane domain
AKPTTTPAPRPPTPAPTIASQPLSLRPEACRPAAGGAVHTRGLDFACDIYIWAPLAGTCGVLLLSLVIT

SEQ ID NO: 288 - protein, 68 aa, Artificial Sequence
  CD8 hinge and transmembrane domain
KPTTTPAPRPPTPAPTIASQPLSLRPEACRPAAGGAVHTRGLDFACDIYIWAPLAGTCGVLLLSLVIT

SEQ ID NO: 289 - protein, 125 aa, Artificial Sequence
  GITR VH
QVQLQESGPGLVKPSETLSLTCTVSGGSISSGGYFWSWIRQPPGKGLEWIGYIYYSGTTYYNPSLKSRVTISIDTSKNQFSLKLSSVTAADTAVYYCARDLFYYDTSGPRGFDPWGQGTLVTVSS

SEQ ID NO: 290 - protein, 108 aa, Artificial Sequence
  GITR VL
EIVLTQSPGTLSLSPGERATLSCRASQTVSSNYLAWYQQKPGQAPRLLIYGSSTRATGIPDRFSGSGSGTDFTLTISRLEPEDFAVYYCQQYDSSPWTFGQGTKVEIK

SEQ ID NO: 291 - protein, 123 aa, Artificial Sequence
  GITR VH
QVQLVESGGGVVQPGRSLRLSCAASGFTFSSYGMHWVRQAPGKGLEWVAVIWYPGSNKYYAESVKGRFTISRDNSKNTLYLQMNSLRAEDTAVYYCARGGELGRYYYYGMDVWGQGTTVTVSS

SEQ ID NO: 292 - protein, 107 aa, Artificial Sequence
  GITR VL
DIQMTQSPSSLSASVGDRVTVTCRASQGIRNDLGWYQQKPGKAPKRLIYAASSLQSGVPSRFSGSGSGTEFTLTISSLQPEDFATYYCLQHNNYPWTFGQGTKVDIK

SEQ ID NO: 293 - protein, 226 aa, Artificial Sequence
  Knob Fc
DKTHTCPPCPAPELLGGPSVFLFPPKPKDTLMISRTPEVTCVVVDVSHEDPEVKFNWYVDGVEVHNAKTKPREEQYNSTYRVVSVLTVLHQDWLNGKEYKCKVSNKALPAPIEKTISKAKGQPREPQVYTLPPCRDELTKNQVSLWCLVKGFYPSDIAVEWESNGQPENNYKTTPPVLDSDGSFFLYSKLTVDKSRWQQGNVFSCSVMHEALHNHYTQKSLSLSPT

SEQ ID NO: 294 - protein, 226 aa, Artificial Sequence
  Hole Fc
DKTHTCPPCPAPELLGGPSVFLFPPKPKDTLMRSRTPEVTCVVVDVSHEDPEVKFNWYVDGVEVHNAKTKPREEQYNSTYRVVSVLTVLHQDWLNGKEYKCKVSNKALPAPIEKTISKAKGQPREPQVCTLPPSRDELTKNQVSLSCAVKGFYPSDIAVEWESNGQPENNYKTTPPVLDSDGSFFLVSKLTVDKSRWQQGNVFSCSVMHEALHNHYTQKSLSLSPT

SEQ ID NO: 295 - protein, 223 aa, Artificial Sequence
  Knob Fc
DKTHTCPPCPAPGGPSVFLFPPKPKDTLMISRTPEVTCVVVDVSHEDPEVKFNWYVDGVEVHNAKTKPREEQYNSTYRVVSVLTVLHQDWLNGKEYKCKVSNKALPAPIEKTISKAKGQPREPQVYTLPPCRDELTKNQVSLWCLVKGFYPSDIAVEWESNGQPENNYKTTPPVLDSDGSFFLYSKLTVDKSRWQQGNVFSCSVMHEALHNHYTQKSLSLSPT

SEQ ID NO: 296 - protein, 223 aa, Artificial Sequence
  Hole Fc
DKTHTCPPCPAPGGPSVFLFPPKPKDTLMRSRTPEVTCVVVDVSHEDPEVKFNWYVDGVEVHNAKTKPREEQYNSTYRVVSVLTVLHQDWLNGKEYKCKVSNKALPAPIEKTISKAKGQPREPQVCTLPPSRDELTKNQVSLSCAVKGFYPSDIAVEWESNGQPENNYKTTPPVLDSDGSFFLVSKLTVDKSRWQQGNVFSCSVMHEALHNHYTQKSLSLSPT

SEQ ID NO: 297 - protein, 226 aa, Artificial Sequence
  Knob Fc
DKTHTCPPCPAPELLGGPSVFLFPPKPKDTLMISRTPEVTCVVVDVSHEDPEVKFNWYVDGVEVHNAKTKPREEQYNSTYRVVSVLTVLHQDWLNGKEYKCKVSNKALPAPIEKTISKAKGQPREPQVYTLPPCRDELTKNQVSLWCLVKGFYPSDIAVEWESNGQPENNYKTTPPVLDSDGSFFLYSKLTVDKSRWQQGNVFSCSVMHEALHNHYTQKSLSLSPG

SEQ ID NO: 298 - protein, 226 aa, Artificial Sequence
  Hole Fc
DKTHTCPPCPAPELLGGPSVFLFPPKPKDTLMRSRTPEVTCVVVDVSHEDPEVKFNWYVDGVEVHNAKTKPREEQYNSTYRVVSVLTVLHQDWLNGKEYKCKVSNKALPAPIEKTISKAKGQPREPQVCTLPPSRDELTKNQVSLSCAVKGFYPSDIAVEWESNGQPENNYKTTPPVLDSDGSFFLVSKLTVDKSRWQQGNVFSCSVMHEALHNHYTQKSLSLSPG

SEQ ID NO: 299 - protein, 223 aa, Artificial Sequence
  Knob Fc
DKTHTCPPCPAPGGPSVFLFPPKPKDTLMISRTPEVTCVVVDVSHEDPEVKFNWYVDGVEVHNAKTKPREEQYNSTYRVVSVLTVLHQDWLNGKEYKCKVSNKALPAPIEKTISKAKGQPREPQVYTLPPCRDELTKNQVSLWCLVKGFYPSDIAVEWESNGQPENNYKTTPPVLDSDGSFFLYSKLTVDKSRWQQGNVFSCSVMHEALHNHYTQKSLSLSPG

SEQ ID NO: 300 - protein, 223 aa, Artificial Sequence
  Hole Fc
DKTHTCPPCPAPGGPSVFLFPPKPKDTLMRSRTPEVTCVVVDVSHEDPEVKFNWYVDGVEVHNAKTKPREEQYNSTYRVVSVLTVLHQDWLNGKEYKCKVSNKALPAPIEKTISKAKGQPREPQVCTLPPSRDELTKNQVSLSCAVKGFYPSDIAVEWESNGQPENNYKTTPPVLDSDGSFFLVSKLTVDKSRWQQGNVFSCSVMHEALHNHYTQKSLSLSPG

SEQ ID NO: 301 - protein, 226 aa, Artificial Sequence
  Hole Fc
DKTHTCPPCPAPELLGGPSVFLFPPKPKDTLMISRTPEVTCVVVDVSHEDPEVKFNWYVDGVEVHNAKTKPREEQYNSTYRVVSVLTVLHQDWLNGKEYKCKVSNKALPAPIEKTISKAKGQPREPQVCTLPPSRDELTKNQVSLSCAVKGFYPSDIAVEWESNGQPENNYKTTPPVLDSDGSFFLVSKLTVDKSRWQQGNVFSCSVMHEALHNRYTQKSLSLSPT

SEQ ID NO: 302 - protein, 223 aa, Artificial Sequence
  Hole Fc
DKTHTCPPCPAPGGPSVFLFPPKPKDTLMISRTPEVTCVVVDVSHEDPEVKFNWYVDGVEVHNAKTKPREEQYNSTYRVVSVLTVLHQDWLNGKEYKCKVSNKALPAPIEKTISKAKGQPREPQVCTLPPSRDELTKNQVSLSCAVKGFYPSDIAVEWESNGQPENNYKTTPPVLDSDGSFFLVSKLTVDKSRWQQGNVFSCSVMHEALHNRYTQKSLSLSPT

SEQ ID NO: 303 - protein, 226 aa, Artificial Sequence
  Hole Fc
DKTHTCPPCPAPELLGGPSVFLFPPKPKDTLMISRTPEVTCVVVDVSHEDPEVKFNWYVDGVEVHNAKTKPREEQYNSTYRVVSVLTVLHQDWLNGKEYKCKVSNKALPAPIEKTISKAKGQPREPQVCTLPPSRDELTKNQVSLSCAVKGFYPSDIAVEWESNGQPENNYKTTPPVLDSDGSFFLVSKLTVDKSRWQQGNVFSCSVMHEALHNRYTQKSLSLSPG

SEQ ID NO: 304 - protein, 223 aa, Artificial Sequence
  Hole Fc
DKTHTCPPCPAPGGPSVFLFPPKPKDTLMISRTPEVTCVVVDVSHEDPEVKFNWYVDGVEVHNAKTKPREEQYNSTYRVVSVLTVLHQDWLNGKEYKCKVSNKALPAPIEKTISKAKGQPREPQVCTLPPSRDELTKNQVSLSCAVKGFYPSDIAVEWESNGQPENNYKTTPPVLDSDGSFFLVSKLTVDKSRWQQGNVFSCSVMHEALHNRYTQKSLSLSPG

SEQ ID NO: 305 - protein, 226 aa, Artificial Sequence
  Knob Fc
DKTHTCPPCPAPELLGGPSVFLFPPKPKDTLYISRTPEVTCVVVDVSHEDPEVKFNWYVDGVEVHNAKTKPREEQYNSTYRVVSVLTVLHQDWLNGKEYKCKVSNKALPAPIEKTISKAKGQPREPQVYTLPPCRDELTKNQVSLWCLVKGFYPSDIAVEWESNGQPENNYKTTPPVLDSDGSFFLYSKLTVDKSRWQQGNVFSCSVVHEALHNHYTQKSLSLSPT

SEQ ID NO: 306 - protein, 223 aa, Artificial Sequence
  Knob Fc
DKTHTCPPCPAPGGPSVFLFPPKPKDTLYISRTPEVTCVVVDVSHEDPEVKFNWYVDGVEVHNAKTKPREEQYNSTYRVVSVLTVLHQDWLNGKEYKCKVSNKALPAPIEKTISKAKGQPREPQVYTLPPCRDELTKNQVSLWCLVKGFYPSDIAVEWESNGQPENNYKTTPPVLDSDGSFFLYSKLTVDKSRWQQGNVFSCSVVHEALHNHYTQKSLSLSPT

SEQ ID NO: 307 - protein, 226 aa, Artificial Sequence
  Knob Fc
DKTHTCPPCPAPELLGGPSVFLFPPKPKDTLYISRTPEVTCVVVDVSHEDPEVKFNWYVDGVEVHNAKTKPREEQYNSTYRVVSVLTVLHQDWLNGKEYKCKVSNKALPAPIEKTISKAKGQPREPQVYTLPPCRDELTKNQVSLWCLVKGFYPSDIAVEWESNGQPENNYKTTPPVLDSDGSFFLYSKLTVDKSRWQQGNVFSCSVVHEALHNHYTQKSLSLSPG

SEQ ID NO: 308 - protein, 223 aa, Artificial Sequence
  Knob Fc
DKTHTCPPCPAPGGPSVFLFPPKPKDTLYISRTPEVTCVVVDVSHEDPEVKFNWYVDGVEVHNAKTKPREEQYNSTYRVVSVLTVLHQDWLNGKEYKCKVSNKALPAPIEKTISKAKGQPREPQVYTLPPCRDELTKNQVSLWCLVKGFYPSDIAVEWESNGQPENNYKTTPPVLDSDGSFFLYSKLTVDKSRWQQGNVFSCSVVHEALHNHYTQKSLSLSPG

SEQ ID NO: 309 - protein, 226 aa, Artificial Sequence
  Hole Fc
DKTHTCPPCPAPELLGGPSVFLFPPKPKDTLYISRTPEVTCVVVDVSHEDPEVKFNWYVDGVEVHNAKTKPREEQYNSTYRVVSVLTVLHQDWLNGKEYKCKVSNKALPAPIEKTISKAKGQPREPQVCTLPPSRDELTKNQVSLSCAVKGFYPSDIAVEWESNGQPENNYKTTPPVLDSDGSFFLVSKLTVDKSRWQQGNVFSCSVVHEALHNRYTQKSLSLSPT

SEQ ID NO: 310 - protein, 223 aa, Artificial Sequence
  Hole Fc
DKTHTCPPCPAPGGPSVFLFPPKPKDTLYISRTPEVTCVVVDVSHEDPEVKFNWYVDGVEVHNAKTKPREEQYNSTYRVVSVLTVLHQDWLNGKEYKCKVSNKALPAPIEKTISKAKGQPREPQVCTLPPSRDELTKNQVSLSCAVKGFYPSDIAVEWESNGQPENNYKTTPPVLDSDGSFFLVSKLTVDKSRWQQGNVFSCSVVHEALHNRYTQKSLSLSPT

SEQ ID NO: 311 - protein, 226 aa, Artificial Sequence
  Hole Fc
DKTHTCPPCPAPELLGGPSVFLFPPKPKDTLYISRTPEVTCVVVDVSHEDPEVKFNWYVDGVEVHNAKTKPREEQYNSTYRVVSVLTVLHQDWLNGKEYKCKVSNKALPAPIEKTISKAKGQPREPQVCTLPPSRDELTKNQVSLSCAVKGFYPSDIAVEWESNGQPENNYKTTPPVLDSDGSFFLVSKLTVDKSRWQQGNVFSCSVVHEALHNRYTQKSLSLSPG

SEQ ID NO: 312 - protein, 223 aa, Artificial Sequence
  Hole Fc
DKTHTCPPCPAPGGPSVFLFPPKPKDTLYISRTPEVTCVVVDVSHEDPEVKFNWYVDGVEVHNAKTKPREEQYNSTYRVVSVLTVLHQDWLNGKEYKCKVSNKALPAPIEKTISKAKGQPREPQVCTLPPSRDELTKNQVSLSCAVKGFYPSDIAVEWESNGQPENNYKTTPPVLDSDGSFFLVSKLTVDKSRWQQGNVFSCSVVHEALHNRYTQKSLSLSPG

SEQ ID NO: 313 - protein, 25 aa, Artificial Sequence
  Linker
  MISC_FEATURE (6)..(6): Xaa is absent or Gly
  MISC_FEATURE (7)..(7): Xaa is absent, or if Xaa at (6) is Gly, Xaa is Gly
  MISC_FEATURE (8)..(8): Xaa is absent, or if Xaa at (6) is Gly, Xaa is Gly
  MISC_FEATURE (9)..(9): Xaa is absent, or if Xaa at (6) is Gly, Xaa is Gly
  MISC_FEATURE (10)..(10): Xaa is absent, or if Xaa at (6) is Gly, Xaa is Ser
  MISC_FEATURE (11)..(11): Xaa is absent or Gly
  MISC_FEATURE (12)..(12): Xaa is absent, or if Xaa at (11) is Gly, Xaa is Gly
  MISC_FEATURE (13)..(13): Xaa is absent, or if Xaa at (11) is Gly, Xaa is Gly
  MISC_FEATURE (14)..(14): Xaa is absent, or if Xaa at (11) is Gly, Xaa is Gly
  MISC_FEATURE (15)..(15): Xaa is absent, or if Xaa at (11) is Gly, Xaa is Ser
  MISC_FEATURE (16)..(16): Xaa is absent or Gly
  MISC_FEATURE (17)..(17): Xaa is absent, or if Xaa at (16) is Gly, Xaa is Gly
  MISC_FEATURE (18)..(18): Xaa is absent, or if Xaa at (16) is Gly, Xaa is Gly
  MISC_FEATURE (19)..(19): Xaa is absent, or if Xaa at (16) is Gly, Xaa is Gly
  MISC_FEATURE (20)..(20): Xaa is absent, or if Xaa at (16) is Gly, Xaa is Ser
  MISC_FEATURE (21)..(21): Xaa is absent or Gly
  MISC_FEATURE (22)..(22): Xaa is absent, or if Xaa at (22) is Gly, Xaa is Gly
  MISC_FEATURE (23)..(23): Xaa is absent, or if Xaa at (22) is Gly, Xaa is Gly
  MISC_FEATURE (24)..(24): Xaa is absent, or if Xaa at (22) is Gly, Xaa is Gly
  MISC_FEATURE (25)..(25): Xaa is absent, or if Xaa at (22) is Gly, Xaa is Ser
GGGGSXXXXXXXXXXXXXXXXXXXX

SEQ ID NO: 314 - protein, 24 aa, Artificial Sequence
  Linker
  MISC_FEATURE (7)..(7): Xaa is absent or Gly
  MISC_FEATURE (8)..(8): Xaa is absent, or if Xaa at (7) is Gly, Xaa is Gly
  MISC_FEATURE (9)..(9): Xaa is absent, or if Xaa at (7) is Gly, Xaa is Gly
  MISC_FEATURE (10)..(10): Xaa is absent, or if Xaa at (7) is Gly, Xaa is Gly
  MISC_FEATURE (11)..(11): Xaa is absent, or if Xaa at (7) is Gly, Xaa is Gly
  MISC_FEATURE (12)..(12): Xaa is absent, or if Xaa at (7) is Gly, Xaa is Ser
  MISC_FEATURE (13)..(13): Xaa is absent or Gly
  MISC_FEATURE (14)..(14): Xaa is absent, or if Xaa at (13) is Gly, Xaa is Gly
  MISC_FEATURE (15)..(15): Xaa is absent, or if Xaa at (13) is Gly, Xaa is Gly
  MISC_FEATURE (16)..(16): Xaa is absent, or if Xaa at (13) is Gly, Xaa is Gly
  MISC_FEATURE (17)..(17): Xaa is absent, or if Xaa at (13) is Gly, Xaa is Gly
  MISC_FEATURE (18)..(18): Xaa is absent, or if Xaa at (13) is Gly, Xaa is Ser
  MISC_FEATURE (19)..(19): Xaa is absent or Gly
  MISC_FEATURE (20)..(20): Xaa is absent, or if Xaa at (19) is Gly, Xaa is Gly
  MISC_FEATURE (21)..(21): Xaa is absent, or if Xaa at (19) is Gly, Xaa is Gly
  MISC_FEATURE (22)..(22): Xaa is absent, or if Xaa at (19) is Gly, Xaa is Gly
  MISC_FEATURE (23)..(23): Xaa is absent, or if Xaa at (19) is Gly, Xaa is Gly
  MISC_FEATURE (24)..(24): Xaa is absent, or if Xaa at (19) is Gly, Xaa is Ser
GGGGGSXXXXXXXXXXXXXXXXXX

SEQ ID NO: 315 - protein, 5 aa, Artificial Sequence
  Linker
GGGGS

SEQ ID NO: 316 - protein, 6 aa, Artificial Sequence
  Linker
GGGGGS

SEQ ID NO: 317 - protein, 18 aa, Artificial Sequence
  Linker
GGGGGSGGGGGSGGGGGS

SEQ ID NO: 318 - protein, 15 aa, Artificial Sequence
  Linker
GGGGSGGGGSGGGGS

SEQ ID NO: 319 - protein, 18 aa, Artificial Sequence
  Linker
GGSGGGGSGGGGSGGGGS

SEQ ID NO: 320 - protein, 17 aa, Artificial Sequence
  Linker
  MISC_FEATURE (2)..(2): Xaa is absent or Gly
  MISC_FEATURE (3)..(3): Xaa is absent or Gly
  MISC_FEATURE (4)..(4): Xaa is absent or Gly
  MISC_FEATURE (5)..(5): Xaa is absent or Gly
  MISC_FEATURE (8)..(8): Xaa is absent or Gly
  MISC_FEATURE (9)..(9): Xaa is absent or Gly
  MISC_FEATURE (10)..(10): Xaa is absent or Gly
  MISC_FEATURE (11)..(11): Xaa is absent or Gly
  MISC_FEATURE (14)..(14): Xaa is absent or Gly
  MISC_FEATURE (15)..(15): Xaa is absent or Gly
  MISC_FEATURE (16)..(16): Xaa is absent or Gly
  MISC_FEATURE (17)..(17): Xaa is absent or Gly
  VARIANT (6)..(6): Xaa= A, V, L, I, M,F, W, P, G, S, T, C, Y, N,Q, K, R, H, D, or E
  VARIANT (12)..(12): Xaa = A, V, L, I, M,F, W, P, G, S, T, C, Y, N,Q, K, R, H, D, or E
GXXXXXGXXXXXGXXXX

SEQ ID NO: 321 - protein, 11 aa, Artificial Sequence
  VARIANT 4: Xaa = A, V, L, I, M,F, W, P, G, S, T, C, Y, N,Q, K, R, H, D, or E
  VARIANT 8: Xaa = A, V, L, I, M,F, W, P, G, S, T, C, Y, N,Q, K, R, H, D, or E
  Linker
GGGXGGGXGGG

SEQ ID NO: 322 - protein, 45 aa, Artificial Sequence
  Linker
  MISC_FEATURE (6)..(6): Xaa is absent or Ser
  MISC_FEATURE (7)..(7): Xaa is absent, or if Xaa at (6) is Ser, Xaa is Ser
  MISC_FEATURE (8)..(8): Xaa is absent, or if Xaa at (6) is Ser, Xaa is Ser
  MISC_FEATURE (9)..(9): Xaa is absent, or if Xaa at (6) is Ser, Xaa is Ser
  MISC_FEATURE (10)..(10): Xaa is absent, or if Xaa at (6) is Ser, Xaa is Gly
  MISC_FEATURE (11)..(11): Xaa is absent or Ser
  MISC_FEATURE (12)..(12): Xaa is absent, or if Xaa at (11) is Ser, Xaa is Ser
  MISC_FEATURE (13)..(13): Xaa is absent, or if Xaa at (11) is Ser, Xaa is Ser
  MISC_FEATURE (14)..(14): Xaa is absent, or if Xaa at (11) is Ser, Xaa is Ser
  MISC_FEATURE (15)..(15): Xaa is absent, or if Xaa at (11) is Ser, Xaa is Gly
  MISC_FEATURE (16)..(16): Xaa is absent or Ser
  MISC_FEATURE (17)..(17): Xaa is absent, or if Xaa at (16) is Ser, Xaa is Ser
  MISC_FEATURE (18)..(18): Xaa is absent, or if Xaa at (16) is Ser, Xaa is Ser
  MISC_FEATURE (19)..(19): Xaa is absent, or if Xaa at (16) is Ser, Xaa is Ser
  MISC_FEATURE (20)..(20): Xaa is absent, or if Xaa at (16) is Ser, Xaa is Gly
  MISC_FEATURE (21)..(21): Xaa is absent or Ser
  MISC_FEATURE (22)..(22): Xaa is absent, or if Xaa at (21) is Ser, Xaa is Ser
  MISC_FEATURE (23)..(23): Xaa is absent, or if Xaa at (21) is Ser, Xaa is Ser
  MISC_FEATURE (24)..(24): Xaa is absent, or if Xaa at (21) is Ser, Xaa is GSer
  MISC_FEATURE (25)..(25): Xaa is absent, or if Xaa at (21) is Ser, Xaa is Gly
  MISC_FEATURE (26)..(26): Xaa is absent or Ser
  MISC_FEATURE (27)..(27): Xaa is absent, or if Xaa at (26) is Ser, Xaa is Ser
  MISC_FEATURE (28)..(28): Xaa is absent, or if Xaa at (26) is Ser, Xaa is Ser
  MISC_FEATURE (29)..(29): Xaa is absent, or if Xaa at (26) is Ser, Xaa is Ser
  MISC_FEATURE (30)..(30): Xaa is absent, or if Xaa at (26) is Ser, Xaa is Gly
  MISC_FEATURE (31)..(31): Xaa is absent or Ser
  MISC_FEATURE (32)..(32): Xaa is absent, or if Xaa at (31) is Ser, Xaa is Ser
  MISC_FEATURE (33)..(33): Xaa is absent, or if Xaa at (31) is Ser, Xaa is Ser
  MISC_FEATURE (34)..(34): Xaa is absent, or if Xaa at (31) is Ser, Xaa is Ser
  MISC_FEATURE (35)..(35): Xaa is absent, or if Xaa at (31) is Ser, Xaa is Gly
  MISC_FEATURE (36)..(36): Xaa is absent or Ser
  MISC_FEATURE (37)..(37): Xaa is absent, or if Xaa at (36) is Ser, Xaa is Ser
  MISC_FEATURE (38)..(38): Xaa is absent, or if Xaa at (36) is Ser, Xaa is Ser
  MISC_FEATURE (39)..(39): Xaa is absent, or if Xaa at (36) is Ser, Xaa is Ser
  MISC_FEATURE (40)..(40): Xaa is absent, or if Xaa at (36) is Ser, Xaa is Gly
  MISC_FEATURE (41)..(41): Xaa is absent or Ser
  MISC_FEATURE (42)..(42): Xaa is absent, or if Xaa at (41) is Ser, Xaa is Ser
  MISC_FEATURE (43)..(43): Xaa is absent, or if Xaa at (41) is Ser, Xaa is Ser
  MISC_FEATURE (44)..(44): Xaa is absent, or if Xaa at (41) is Ser, Xaa is Ser
  MISC_FEATURE (45)..(45): Xaa is absent, or if Xaa at (41) is Ser, Xaa is Gly
SSSSGXXXXXXXXXXXXXXXXXXXXXXXXXXXXXXXXXXXXXXXX

SEQ ID NO: 323 - protein, 11 aa, Artificial Sequence
  Linker
GGGGGCGGGGG

SEQ ID NO: 324 - protein, 100 aa, Artificial Sequence
  Linker
  MISC_FEATURE (11)..(11): Xaa is absent or Glu
  MISC_FEATURE (12)..(12): Xaa is absent, or if Xaa at (11) is Glu, Xaa is Ala
  MISC_FEATURE (13)..(13): Xaa is absent, or if Xaa at (11) is Glu, Xaa is Ala
  MISC_FEATURE (14)..(14): Xaa is absent, or if Xaa at (11) is Glu, Xaa is Ala
  MISC_FEATURE (15)..(15): Xaa is absent, or if Xaa at (11) is Glu, Xaa is Lys
  MISC_FEATURE (16)..(16): Xaa is absent or Glu
  MISC_FEATURE (17)..(17): Xaa is absent, or if Xaa at (16) is Glu, Xaa is Ala
  MISC_FEATURE (18)..(18): Xaa is absent, or if Xaa at (16) is Glu, Xaa is Ala
  MISC_FEATURE (19)..(19): Xaa is absent, or if Xaa at (16) is Glu, Xaa is Ala
  MISC_FEATURE (20)..(20): Xaa is absent, or if Xaa at (16) is Glu, Xaa is Lys
  MISC_FEATURE (21)..(21): Xaa is absent or Glu
  MISC_FEATURE (22)..(22): Xaa is absent, or if Xaa at (21) is Glu, Xaa is Ala
  MISC_FEATURE (23)..(23): Xaa is absent, or if Xaa at (21) is Glu, Xaa is Ala
  MISC_FEATURE (24)..(24): Xaa is absent, or if Xaa at (21) is Glu, Xaa is Ala
  MISC_FEATURE (25)..(25): Xaa is absent, or if Xaa at (21) is Glu, Xaa is Lys
  MISC_FEATURE (26)..(26): Xaa is absent or Glu
  MISC_FEATURE (27)..(27): Xaa is absent, or if Xaa at (26) is Glu, Xaa is Ala
  MISC_FEATURE (28)..(28): Xaa is absent, or if Xaa at (26) is Glu, Xaa is Ala
  MISC_FEATURE (29)..(29): Xaa is absent, or if Xaa at (26) is Glu, Xaa is Ala
  MISC_FEATURE (30)..(30): Xaa is absent, or if Xaa at (26) is Glu, Xaa is Lys
  MISC_FEATURE (31)..(31): Xaa is absent or Glu
  MISC_FEATURE (32)..(32): Xaa is absent, or if Xaa at (31) is Glu, Xaa is Ala
  MISC_FEATURE (33)..(33): Xaa is absent, or if Xaa at (31) is Glu, Xaa is Ala
  MISC_FEATURE (34)..(34): Xaa is absent, or if Xaa at (31) is Glu, Xaa is Ala
  MISC_FEATURE (35)..(35): Xaa is absent, or if Xaa at (31) is Glu, Xaa is Lys
  MISC_FEATURE (36)..(36): Xaa is absent or Glu
  MISC_FEATURE (37)..(37): Xaa is absent, or if Xaa at (36) is Glu, Xaa is Ala
  MISC_FEATURE (38)..(38): Xaa is absent, or if Xaa at (36) is Glu, Xaa is Ala
  MISC_FEATURE (39)..(39): Xaa is absent, or if Xaa at (36) is Glu, Xaa is Ala
  MISC_FEATURE (40)..(40): Xaa is absent, or if Xaa at (36) is Glu, Xaa is Lys
  MISC_FEATURE (41)..(41): Xaa is absent or Glu
  MISC_FEATURE (42)..(42): Xaa is absent, or if Xaa at (41) is Glu, Xaa is Ala
  MISC_FEATURE (43)..(43): Xaa is absent, or if Xaa at (41) is Glu, Xaa is Ala
  MISC_FEATURE (44)..(44): Xaa is absent, or if Xaa at (41) is Glu, Xaa is Ala
  MISC_FEATURE (45)..(45): Xaa is absent, or if Xaa at (41) is Glu, Xaa is Lys
  MISC_FEATURE (46)..(46): Xaa is absent or Glu
  MISC_FEATURE (47)..(47): Xaa is absent, or if Xaa at (46) is Glu, Xaa is Ala
  MISC_FEATURE (48)..(48): Xaa is absent, or if Xaa at (46) is Glu, Xaa is Ala
  MISC_FEATURE (49)..(49): Xaa is absent, or if Xaa at (46) is Glu, Xaa is Ala
  MISC_FEATURE (50)..(50): Xaa is absent, or if Xaa at (46) is Glu, Xaa is Lys
  MISC_FEATURE (51)..(51): Xaa is absent or Glu
  MISC_FEATURE (52)..(52): Xaa is absent, or if Xaa at (51) is Glu, Xaa is Ala
  MISC_FEATURE (53)..(53): Xaa is absent, or if Xaa at (51) is Glu, Xaa is Ala
  MISC_FEATURE (54)..(54): Xaa is absent, or if Xaa at (51) is Glu, Xaa is Ala
  MISC_FEATURE (55)..(55): Xaa is absent, or if Xaa at (51) is Glu, Xaa is Lys
  MISC_FEATURE (56)..(56): Xaa is absent or Glu
  MISC_FEATURE (57)..(57): Xaa is absent, or if Xaa at (56) is Glu, Xaa is Ala
  MISC_FEATURE (58)..(58): Xaa is absent, or if Xaa at (56) is Glu, Xaa is Ala
  MISC_FEATURE (59)..(59): Xaa is absent, or if Xaa at (56) is Glu, Xaa is Ala
  MISC_FEATURE (60)..(60): Xaa is absent, or if Xaa at (56) is Glu, Xaa is Lys
  MISC_FEATURE (61)..(61): Xaa is absent or Glu
  MISC_FEATURE (62)..(62): Xaa is absent, or if Xaa at (61) is Glu, Xaa is Ala
  MISC_FEATURE (63)..(63): Xaa is absent, or if Xaa at (61) is Glu, Xaa is Ala
  MISC_FEATURE (64)..(64): Xaa is absent, or if Xaa at (61) is Glu, Xaa is Ala
  MISC_FEATURE (65)..(65): Xaa is absent, or if Xaa at (61) is Glu, Xaa is Lys
  MISC_FEATURE (66)..(66): Xaa is absent or Glu
  MISC_FEATURE (67)..(67): Xaa is absent, or if Xaa at (66) is Glu, Xaa is Ala
  MISC_FEATURE (68)..(68): Xaa is absent, or if Xaa at (66) is Glu, Xaa is Ala
  MISC_FEATURE (69)..(69): Xaa is absent, or if Xaa at (66) is Glu, Xaa is Ala
  MISC_FEATURE (70)..(70): Xaa is absent, or if Xaa at (66) is Glu, Xaa is Lys
  MISC_FEATURE (71)..(71): Xaa is absent or Glu
  MISC_FEATURE (72)..(72): Xaa is absent, or if Xaa at (71) is Glu, Xaa is Ala
  MISC_FEATURE (73)..(73): Xaa is absent, or if Xaa at (71) is Glu, Xaa is Ala
  MISC_FEATURE (74)..(74): Xaa is absent, or if Xaa at (71) is Glu, Xaa is Ala
  MISC_FEATURE (75)..(75): Xaa is absent, or if Xaa at (71) is Glu, Xaa is Lys
  MISC_FEATURE (76)..(76): Xaa is absent or Glu
  MISC_FEATURE (77)..(77): Xaa is absent, or if Xaa at (76) is Glu, Xaa is Ala
  MISC_FEATURE (78)..(78): Xaa is absent, or if Xaa at (76) is Glu, Xaa is Ala
  MISC_FEATURE (79)..(79): Xaa is absent, or if Xaa at (76) is Glu, Xaa is Ala
  MISC_FEATURE (80)..(80): Xaa is absent, or if Xaa at (76) is Glu, Xaa is Lys
  MISC_FEATURE (81)..(81): Xaa is absent or Glu
  MISC_FEATURE (82)..(82): Xaa is absent, or if Xaa at (81) is Glu, Xaa is Ala
  MISC_FEATURE (83)..(83): Xaa is absent, or if Xaa at (81) is Glu, Xaa is Ala
  MISC_FEATURE (84)..(84): Xaa is absent, or if Xaa at (81) is Glu, Xaa is Ala
  MISC_FEATURE (85)..(85): Xaa is absent, or if Xaa at (81) is Glu, Xaa is Lys
  MISC_FEATURE (86)..(86): Xaa is absent or Glu
  MISC_FEATURE (87)..(87): Xaa is absent, or if Xaa at (86) is Glu, Xaa is Ala
  MISC_FEATURE (88)..(88): Xaa is absent, or if Xaa at (86) is Glu, Xaa is Ala
  MISC_FEATURE (89)..(89): Xaa is absent, or if Xaa at (86) is Glu, Xaa is Ala
  MISC_FEATURE (90)..(90): Xaa is absent, or if Xaa at (86) is Glu, Xaa is Lys
  MISC_FEATURE (91)..(91): Xaa is absent or Glu
  MISC_FEATURE (92)..(92): Xaa is absent, or if Xaa at (91) is Glu, Xaa is Ala
  MISC_FEATURE (93)..(93): Xaa is absent, or if Xaa at (91) is Glu, Xaa is Ala
  MISC_FEATURE (94)..(94): Xaa is absent, or if Xaa at (91) is Glu, Xaa is Ala
  MISC_FEATURE (95)..(95): Xaa is absent, or if Xaa at (91) is Glu, Xaa is Lys
  MISC_FEATURE (96)..(96): Xaa is absent or Glu
  MISC_FEATURE (97)..(97): Xaa is absent, or if Xaa at (96) is Glu, Xaa is Ala
  MISC_FEATURE (98)..(98): Xaa is absent, or if Xaa at (96) is Glu, Xaa is Ala
  MISC_FEATURE (99)..(99): Xaa is absent, or if Xaa at (96) is Glu, Xaa is Ala
  MISC_FEATURE (100)..(100): Xaa is absent, or if Xaa at (96) is Glu, Xaa is Lys
EAAAKEAAAKXXXXXXXXXXXXXXXXXXXXXXXXXXXXXXXXXXXXXXXXXXXXXXXXXXXXXXXXXXXXXXXXXXXXXXXXXXXXXXXXXXXXXXXXXX

SEQ ID NO: 325 - protein, 44 aa, Artificial Sequence
  Linker
  MISC_FEATURE (7)..(7): Xaa is absent or Ala
  MISC_FEATURE (8)..(8): Xaa is absent, or if Xaa at (7) is Ala, Xaa is Pro
  MISC_FEATURE (9)..(9): Xaa is absent or Ala
  MISC_FEATURE (10)..(10): Xaa is absent, or if Xaa at (9) is Ala, Xaa is Pro
  MISC_FEATURE (11)..(11): Xaa is absent or Ala
  MISC_FEATURE (12)..(12): Xaa is absent, or if Xaa at (11) is Ala, Xaa is Pro
  MISC_FEATURE (13)..(13): Xaa is absent or Ala
  MISC_FEATURE (14)..(14): Xaa is absent, or if Xaa at (13) is Ala, Xaa is Pro
  MISC_FEATURE (15)..(15): Xaa is absent or Ala
  MISC_FEATURE (16)..(16): Xaa is absent, or if Xaa at (15) is Ala, Xaa is Pro
  MISC_FEATURE (17)..(17): Xaa is absent or Ala
  MISC_FEATURE (18)..(18): Xaa is absent, or if Xaa at (17) is Ala, Xaa is Pro
  MISC_FEATURE (19)..(19): Xaa is absent or Ala
  MISC_FEATURE (20)..(20): Xaa is absent, or if Xaa at (19) is Ala, Xaa is Pro
  MISC_FEATURE (21)..(21): Xaa is absent or Ala
  MISC_FEATURE (22)..(22): Xaa is absent, or if Xaa at (21) is Ala, Xaa is Pro
  MISC_FEATURE (23)..(23): Xaa is absent or Ala
  MISC_FEATURE (24)..(24): Xaa is absent, or if Xaa at (23) is Ala, Xaa is Pro
  MISC_FEATURE (25)..(25): Xaa is absent or Ala
  MISC_FEATURE (26)..(26): Xaa is absent, or if Xaa at (25) is Ala, Xaa is Pro
  MISC_FEATURE (27)..(27): Xaa is absent or Ala
  MISC_FEATURE (28)..(28): Xaa is absent, or if Xaa at (27) is Ala, Xaa is Pro
  MISC_FEATURE (29)..(29): Xaa is absent or Ala
  MISC_FEATURE (30)..(30): Xaa is absent, or if Xaa at (29) is Ala, Xaa is Pro
  MISC_FEATURE (31)..(31): Xaa is absent or Ala
  MISC_FEATURE (32)..(32): Xaa is absent, or if Xaa at (31) is Ala, Xaa is Pro
  MISC_FEATURE (33)..(33): Xaa is absent or Ala
  MISC_FEATURE (34)..(34): Xaa is absent, or if Xaa at (33) is Ala, Xaa is Pro
  MISC_FEATURE (35)..(35): Xaa is absent or Ala
  MISC_FEATURE (36)..(36): Xaa is absent, or if Xaa at (35) is Ala, Xaa is Pro
  MISC_FEATURE (37)..(37): Xaa is absent or Ala
  MISC_FEATURE (38)..(38): Xaa is absent, or if Xaa at (37) is Ala, Xaa is Pro
  MISC_FEATURE (39)..(39): Xaa is absent or Ala
  MISC_FEATURE (40)..(40): Xaa is absent, or if Xaa at (39) is Ala, Xaa is Pro
  MISC_FEATURE (41)..(41): Xaa is absent or Ala
  MISC_FEATURE (42)..(42): Xaa is absent, or if Xaa at (41) is Ala, Xaa is Pro
ASAPAPXXXXXXXXXXXXXXXXXXXXXXXXXXXXXXXXXXXXGT

SEQ ID NO: 326 - protein, 104 aa, Artificial Sequence
  Linker
  MISC_FEATURE (13)..(13): Xaa is absent or Glu
  MISC_FEATURE (14)..(14): Xaa is absent, or if Xaa at (13) is Glu, Xaa is Ala
  MISC_FEATURE (15)..(15): Xaa is absent, or if Xaa at (13) is Glu, Xaa is Ala
  MISC_FEATURE (16)..(16): Xaa is absent, or if Xaa at (13) is Glu, Xaa is Ala
  MISC_FEATURE (17)..(17): Xaa is absent, or if Xaa at (13) is Glu, Xaa is Lys
  MISC_FEATURE (18)..(18): Xaa is absent or Glu
  MISC_FEATURE (19)..(19): Xaa is absent, or if Xaa at (18) is Glu, Xaa is Ala
  MISC_FEATURE (20)..(20): Xaa is absent, or if Xaa at (18) is Glu, Xaa is Ala
  MISC_FEATURE (21)..(21): Xaa is absent, or if Xaa at (18) is Glu, Xaa is Ala
  MISC_FEATURE (22)..(22): Xaa is absent, or if Xaa at (18) is Glu, Xaa is Lys
  MISC_FEATURE (23)..(23): Xaa is absent or Glu
  MISC_FEATURE (24)..(24): Xaa is absent, or if Xaa at (23) is Glu, Xaa is Ala
  MISC_FEATURE (25)..(25): Xaa is absent, or if Xaa at (23) is Glu, Xaa is Ala
  MISC_FEATURE (26)..(26): Xaa is absent, or if Xaa at (23) is Glu, Xaa is Ala
  MISC_FEATURE (27)..(27): Xaa is absent, or if Xaa at (23) is Glu, Xaa is Lys
  MISC_FEATURE (28)..(28): Xaa is absent or Glu
  MISC_FEATURE (29)..(29): Xaa is absent, or if Xaa at (28) is Glu, Xaa is Ala
  MISC_FEATURE (30)..(30): Xaa is absent, or if Xaa at (28) is Glu, Xaa is Ala
  MISC_FEATURE (31)..(31): Xaa is absent, or if Xaa at (28) is Glu, Xaa is Ala
  MISC_FEATURE (32)..(32): Xaa is absent, or if Xaa at (28) is Glu, Xaa is Lys
  MISC_FEATURE (33)..(33): Xaa is absent or Glu
  MISC_FEATURE (34)..(34): Xaa is absent, or if Xaa at (33) is Glu, Xaa is Ala
  MISC_FEATURE (35)..(35): Xaa is absent, or if Xaa at (33) is Glu, Xaa is Ala
  MISC_FEATURE (36)..(36): Xaa is absent, or if Xaa at (33) is Glu, Xaa is Ala
  MISC_FEATURE (37)..(37): Xaa is absent, or if Xaa at (33) is Glu, Xaa is Lys
  MISC_FEATURE (38)..(38): Xaa is absent or Glu
  MISC_FEATURE (39)..(39): Xaa is absent, or if Xaa at (38) is Glu, Xaa is Ala
  MISC_FEATURE (40)..(40): Xaa is absent, or if Xaa at (38) is Glu, Xaa is Ala
  MISC_FEATURE (41)..(41): Xaa is absent, or if Xaa at (38) is Glu, Xaa is Ala
  MISC_FEATURE (42)..(42): Xaa is absent, or if Xaa at (38) is Glu, Xaa is Lys
  MISC_FEATURE (43)..(43): Xaa is absent or Glu
  MISC_FEATURE (44)..(44): Xaa is absent, or if Xaa at (43) is Glu, Xaa is Ala
  MISC_FEATURE (45)..(45): Xaa is absent, or if Xaa at (43) is Glu, Xaa is Ala
  MISC_FEATURE (46)..(46): Xaa is absent, or if Xaa at (43) is Glu, Xaa is Ala
  MISC_FEATURE (47)..(47): Xaa is absent, or if Xaa at (43) is Glu, Xaa is Lys
  MISC_FEATURE (48)..(48): Xaa is absent or Glu
  MISC_FEATURE (49)..(49): Xaa is absent, or if Xaa at (48) is Glu, Xaa is Ala
  MISC_FEATURE (50)..(50): Xaa is absent, or if Xaa at (48) is Glu, Xaa is Ala
  MISC_FEATURE (51)..(51): Xaa is absent, or if Xaa at (48) is Glu, Xaa is Ala
  MISC_FEATURE (52)..(52): Xaa is absent, or if Xaa at (48) is Glu, Xaa is Lys
  MISC_FEATURE (53)..(53): Xaa is absent or Glu
  MISC_FEATURE (54)..(54): Xaa is absent, or if Xaa at (53) is Glu, Xaa is Ala
  MISC_FEATURE (55)..(55): Xaa is absent, or if Xaa at (53) is Glu, Xaa is Ala
  MISC_FEATURE (56)..(56): Xaa is absent, or if Xaa at (53) is Glu, Xaa is Ala
  MISC_FEATURE (57)..(57): Xaa is absent, or if Xaa at (53) is Glu, Xaa is Lys
  MISC_FEATURE (58)..(58): Xaa is absent or Glu
  MISC_FEATURE (59)..(59): Xaa is absent, or if Xaa at (58) is Glu, Xaa is Ala
  MISC_FEATURE (60)..(60): Xaa is absent, or if Xaa at (58) is Glu, Xaa is Ala
  MISC_FEATURE (61)..(61): Xaa is absent, or if Xaa at (58) is Glu, Xaa is Ala
  MISC_FEATURE (62)..(62): Xaa is absent, or if Xaa at (58) is Glu, Xaa is Lys
  MISC_FEATURE (63)..(63): Xaa is absent or Glu
  MISC_FEATURE (64)..(64): Xaa is absent, or if Xaa at (63) is Glu, Xaa is Ala
  MISC_FEATURE (65)..(65): Xaa is absent, or if Xaa at (63) is Glu, Xaa is Ala
  MISC_FEATURE (66)..(66): Xaa is absent, or if Xaa at (63) is Glu, Xaa is Ala
  MISC_FEATURE (67)..(67): Xaa is absent, or if Xaa at (63) is Glu, Xaa is Lys
  MISC_FEATURE (68)..(68): Xaa is absent or Glu
  MISC_FEATURE (69)..(69): Xaa is absent, or if Xaa at (68) is Glu, Xaa is Ala
  MISC_FEATURE (70)..(70): Xaa is absent, or if Xaa at (68) is Glu, Xaa is Ala
  MISC_FEATURE (71)..(71): Xaa is absent, or if Xaa at (68) is Glu, Xaa is Ala
  MISC_FEATURE (72)..(72): Xaa is absent, or if Xaa at (68) is Glu, Xaa is Lys
  MISC_FEATURE (73)..(73): Xaa is absent or Glu
  MISC_FEATURE (74)..(74): Xaa is absent, or if Xaa at (73) is Glu, Xaa is Ala
  MISC_FEATURE (75)..(75): Xaa is absent, or if Xaa at (73) is Glu, Xaa is Ala
  MISC_FEATURE (76)..(76): Xaa is absent, or if Xaa at (73) is Glu, Xaa is Ala
  MISC_FEATURE (77)..(77): Xaa is absent, or if Xaa at (73) is Glu, Xaa is Lys
  MISC_FEATURE (78)..(78): Xaa is absent or Glu
  MISC_FEATURE (79)..(79): Xaa is absent, or if Xaa at (78) is Glu, Xaa is Ala
  MISC_FEATURE (80)..(80): Xaa is absent, or if Xaa at (78) is Glu, Xaa is Ala
  MISC_FEATURE (81)..(81): Xaa is absent, or if Xaa at (78) is Glu, Xaa is Ala
  MISC_FEATURE (82)..(82): Xaa is absent, or if Xaa at (78) is Glu, Xaa is Lys
  MISC_FEATURE (83)..(83): Xaa is absent or Glu
  MISC_FEATURE (84)..(84): Xaa is absent, or if Xaa at (83) is Glu, Xaa is Ala
  MISC_FEATURE (85)..(85): Xaa is absent, or if Xaa at (83) is Glu, Xaa is Ala
  MISC_FEATURE (86)..(86): Xaa is absent, or if Xaa at (83) is Glu, Xaa is Ala
  MISC_FEATURE (87)..(87): Xaa is absent, or if Xaa at (83) is Glu, Xaa is Lys
  MISC_FEATURE (88)..(88): Xaa is absent or Glu
  MISC_FEATURE (89)..(89): Xaa is absent, or if Xaa at (88) is Glu, Xaa is Ala
  MISC_FEATURE (90)..(90): Xaa is absent, or if Xaa at (88) is Glu, Xaa is Ala
  MISC_FEATURE (91)..(91): Xaa is absent, or if Xaa at (88) is Glu, Xaa is Ala
  MISC_FEATURE (92)..(92): Xaa is absent, or if Xaa at (88) is Glu, Xaa is Lys
  MISC_FEATURE (93)..(93): Xaa is absent or Glu
  MISC_FEATURE (94)..(94): Xaa is absent, or if Xaa at (93) is Glu, Xaa is Ala
  MISC_FEATURE (95)..(95): Xaa is absent, or if Xaa at (93) is Glu, Xaa is Ala
  MISC_FEATURE (96)..(96): Xaa is absent, or if Xaa at (93) is Glu, Xaa is Ala
  MISC_FEATURE (97)..(97): Xaa is absent, or if Xaa at (93) is Glu, Xaa is Lys
  MISC_FEATURE (98)..(98): Xaa is absent or Glu
  MISC_FEATURE (99)..(99): Xaa is absent, or if Xaa at (98) is Glu, Xaa is Ala
  MISC_FEATURE (100)..(100): Xaa is absent, or if Xaa at (98) is Glu, Xaa is Ala
  MISC_FEATURE (101)..(101): Xaa is absent, or if Xaa at (98) is Glu, Xaa is Ala
  MISC_FEATURE (102)..(102): Xaa is absent, or if Xaa at (98) is Glu, Xaa is Lys
ASEAAAKEAAAKXXXXXXXXXXXXXXXXXXXXXXXXXXXXXXXXXXXXXXXXXXXXXXXXXXXXXXXXXXXXXXXXXXXXXXXXXXXXXXXXXXXXXXXXXXGT

SEQ ID NO: 327 - protein, 100 aa, Artificial Sequence
  Linker
  MISC_FEATURE (11)..(11): Xaa is absent or Gly
  MISC_FEATURE (12)..(12): Xaa is absent, or if Xaa at (11) is Gly, Xaa is Gly
  MISC_FEATURE (13)..(13): Xaa is absent, or if Xaa at (11) is Gly, Xaa is Gly
  MISC_FEATURE (14)..(14): Xaa is absent, or if Xaa at (11) is Gly, Xaa is Gly
  MISC_FEATURE (15)..(15): Xaa is absent, or if Xaa at (11) is Gly, Xaa is Ala
  MISC_FEATURE (16)..(16): Xaa is absent or Gly
  MISC_FEATURE (17)..(17): Xaa is absent, or if Xaa at (16) is Gly, Xaa is Gly
  MISC_FEATURE (18)..(18): Xaa is absent, or if Xaa at (16) is Gly, Xaa is Gly
  MISC_FEATURE (19)..(19): Xaa is absent, or if Xaa at (16) is Gly, Xaa is Gly
  MISC_FEATURE (20)..(20): Xaa is absent, or if Xaa at (16) is Gly, Xaa is Ala
  MISC_FEATURE (21)..(21): Xaa is absent or Gly
  MISC_FEATURE (22)..(22): Xaa is absent, or if Xaa at (21) is Gly, Xaa is Gly
  MISC_FEATURE (23)..(23): Xaa is absent, or if Xaa at (21) is Gly, Xaa is Gly
  MISC_FEATURE (24)..(24): Xaa is absent, or if Xaa at (21) is Gly, Xaa is Gly
  MISC_FEATURE (25)..(25): Xaa is absent, or if Xaa at (21) is Gly, Xaa is Ala
  MISC_FEATURE (26)..(26): Xaa is absent or Gly
  MISC_FEATURE (27)..(27): Xaa is absent, or if Xaa at (26) is Gly, Xaa is Gly
  MISC_FEATURE (28)..(28): Xaa is absent, or if Xaa at (26) is Gly, Xaa is Gly
  MISC_FEATURE (29)..(29): Xaa is absent, or if Xaa at (26) is Gly, Xaa is Gly
  MISC_FEATURE (30)..(30): Xaa is absent, or if Xaa at (26) is Gly, Xaa is Ala
  MISC_FEATURE (31)..(31): Xaa is absent or Gly
  MISC_FEATURE (32)..(32): Xaa is absent, or if Xaa at (31) is Gly, Xaa is Gly
  MISC_FEATURE (33)..(33): Xaa is absent, or if Xaa at (31) is Gly, Xaa is Gly
  MISC_FEATURE (34)..(34): Xaa is absent, or if Xaa at (31) is Gly, Xaa is Gly
  MISC_FEATURE (35)..(35): Xaa is absent, or if Xaa at (31) is Gly, Xaa is Ala
  MISC_FEATURE (36)..(36): Xaa is absent or Gly
  MISC_FEATURE (37)..(37): Xaa is absent, or if Xaa at (36) is Gly, Xaa is Gly
  MISC_FEATURE (38)..(38): Xaa is absent, or if Xaa at (36) is Gly, Xaa is Gly
  MISC_FEATURE (39)..(39): Xaa is absent, or if Xaa at (36) is Gly, Xaa is Gly
  MISC_FEATURE (40)..(40): Xaa is absent, or if Xaa at (36) is Gly, Xaa is Ala
  MISC_FEATURE (41)..(41): Xaa is absent or Gly
  MISC_FEATURE (42)..(42): Xaa is absent, or if Xaa at (41) is Gly, Xaa is Gly
  MISC_FEATURE (43)..(43): Xaa is absent, or if Xaa at (41) is Gly, Xaa is Gly
  MISC_FEATURE (44)..(44): Xaa is absent, or if Xaa at (41) is Gly, Xaa is Gly
  MISC_FEATURE (45)..(45): Xaa is absent, or if Xaa at (41) is Gly, Xaa is Ala
  MISC_FEATURE (46)..(46): Xaa is absent or Gly
  MISC_FEATURE (47)..(47): Xaa is absent, or if Xaa at (46) is Gly, Xaa is Gly
  MISC_FEATURE (48)..(48): Xaa is absent, or if Xaa at (46) is Gly, Xaa is Gly
  MISC_FEATURE (49)..(49): Xaa is absent, or if Xaa at (46) is Gly, Xaa is Gly
  MISC_FEATURE (50)..(50): Xaa is absent, or if Xaa at (46) is Gly, Xaa is Ala
  MISC_FEATURE (51)..(51): Xaa is absent or Gly
  MISC_FEATURE (52)..(52): Xaa is absent, or if Xaa at (51) is Gly, Xaa is Gly
  MISC_FEATURE (53)..(53): Xaa is absent, or if Xaa at (51) is Gly, Xaa is Gly
  MISC_FEATURE (54)..(54): Xaa is absent, or if Xaa at (51) is Gly, Xaa is Gly
  MISC_FEATURE (55)..(55): Xaa is absent, or if Xaa at (51) is Gly, Xaa is Ala
  MISC_FEATURE (56)..(56): Xaa is absent or Gly
  MISC_FEATURE (57)..(57): Xaa is absent, or if Xaa at (56) is Gly, Xaa is Gly
  MISC_FEATURE (58)..(58): Xaa is absent, or if Xaa at (56) is Gly, Xaa is Gly
  MISC_FEATURE (59)..(59): Xaa is absent, or if Xaa at (56) is Gly, Xaa is Gly
  MISC_FEATURE (60)..(60): Xaa is absent, or if Xaa at (56) is Gly, Xaa is Ala
  MISC_FEATURE (61)..(61): Xaa is absent or Gly
  MISC_FEATURE (62)..(62): Xaa is absent, or if Xaa at (61) is Gly, Xaa is Gly
  MISC_FEATURE (63)..(63): Xaa is absent, or if Xaa at (61) is Gly, Xaa is Gly
  MISC_FEATURE (64)..(64): Xaa is absent, or if Xaa at (61) is Gly, Xaa is Gly
  MISC_FEATURE (65)..(65): Xaa is absent, or if Xaa at (61) is Gly, Xaa is Ala
  MISC_FEATURE (66)..(66): Xaa is absent or Gly
  MISC_FEATURE (67)..(67): Xaa is absent, or if Xaa at (66) is Gly, Xaa is Gly
  MISC_FEATURE (68)..(68): Xaa is absent, or if Xaa at (66) is Gly, Xaa is Gly
  MISC_FEATURE (69)..(69): Xaa is absent, or if Xaa at (66) is Gly, Xaa is Gly
  MISC_FEATURE (70)..(70): Xaa is absent, or if Xaa at (66) is Gly, Xaa is Ala
  MISC_FEATURE (71)..(71): Xaa is absent or Gly
  MISC_FEATURE (72)..(72): Xaa is absent, or if Xaa at (71) is Gly, Xaa is Gly
  MISC_FEATURE (73)..(73): Xaa is absent, or if Xaa at (71) is Gly, Xaa is Gly
  MISC_FEATURE (74)..(74): Xaa is absent, or if Xaa at (71) is Gly, Xaa is Gly
  MISC_FEATURE (75)..(75): Xaa is absent, or if Xaa at (71) is Gly, Xaa is Ala
  MISC_FEATURE (76)..(76): Xaa is absent or Gly
  MISC_FEATURE (77)..(77): Xaa is absent, or if Xaa at (76) is Gly, Xaa is Gly
  MISC_FEATURE (78)..(78): Xaa is absent, or if Xaa at (76) is Gly, Xaa is Gly
  MISC_FEATURE (79)..(79): Xaa is absent, or if Xaa at (76) is Gly, Xaa is Gly
  MISC_FEATURE (80)..(80): Xaa is absent, or if Xaa at (76) is Gly, Xaa is Ala
  MISC_FEATURE (81)..(81): Xaa is absent or Gly
  MISC_FEATURE (82)..(82): Xaa is absent, or if Xaa at (81) is Gly, Xaa is Gly
  MISC_FEATURE (83)..(83): Xaa is absent, or if Xaa at (81) is Gly, Xaa is Gly
  MISC_FEATURE (84)..(84): Xaa is absent, or if Xaa at (81) is Gly, Xaa is Gly
  MISC_FEATURE (85)..(85): Xaa is absent, or if Xaa at (81) is Gly, Xaa is Ala
  MISC_FEATURE (86)..(86): Xaa is absent or Gly
  MISC_FEATURE (87)..(87): Xaa is absent, or if Xaa at (86) is Gly, Xaa is Gly
  MISC_FEATURE (88)..(88): Xaa is absent, or if Xaa at (86) is Gly, Xaa is Gly
  MISC_FEATURE (89)..(89): Xaa is absent, or if Xaa at (86) is Gly, Xaa is Gly
  MISC_FEATURE (90)..(90): Xaa is absent, or if Xaa at (86) is Gly, Xaa is Ala
  MISC_FEATURE (91)..(91): Xaa is absent or Gly
  MISC_FEATURE (92)..(92): Xaa is absent, or if Xaa at (91) is Gly, Xaa is Gly
  MISC_FEATURE (93)..(93): Xaa is absent, or if Xaa at (91) is Gly, Xaa is Gly
  MISC_FEATURE (94)..(94): Xaa is absent, or if Xaa at (91) is Gly, Xaa is Gly
  MISC_FEATURE (95)..(95): Xaa is absent, or if Xaa at (91) is Gly, Xaa is Ala
  MISC_FEATURE (96)..(96): Xaa is absent or Gly
  MISC_FEATURE (97)..(97): Xaa is absent, or if Xaa at (96) is Gly, Xaa is Gly
  MISC_FEATURE (98)..(98): Xaa is absent, or if Xaa at (96) is Gly, Xaa is Gly
  MISC_FEATURE (99)..(99): Xaa is absent, or if Xaa at (96) is Gly, Xaa is Gly
  MISC_FEATURE (100)..(100): Xaa is absent, or if Xaa at (96) is Gly, Xaa is Ala
GGGGAGGGGAXXXXXXXXXXXXXXXXXXXXXXXXXXXXXXXXXXXXXXXXXXXXXXXXXXXXXXXXXXXXXXXXXXXXXXXXXXXXXXXXXXXXXXXXXX

SEQ ID NO: 328 - protein, 100 aa, Artificial Sequence
  Linker
  MISC_FEATURE (11)..(11): Xaa is absent or Pro
  MISC_FEATURE (12)..(12): Xaa is absent, or if Xaa at (11) is Pro, Xaa is Gly
  MISC_FEATURE (13)..(13): Xaa is absent, or if Xaa at (11) is Pro, Xaa is Gly
  MISC_FEATURE (14)..(14): Xaa is absent, or if Xaa at (11) is Pro, Xaa is Gly
  MISC_FEATURE (15)..(15): Xaa is absent, or if Xaa at (11) is Pro, Xaa is Ser
  MISC_FEATURE (16)..(16): Xaa is absent or Pro
  MISC_FEATURE (17)..(17): Xaa is absent, or if Xaa at (16) is Pro, Xaa is Gly
  MISC_FEATURE (18)..(18): Xaa is absent, or if Xaa at (16) is Pro, Xaa is Gly
  MISC_FEATURE (19)..(19): Xaa is absent, or if Xaa at (16) is Pro, Xaa is Gly
  MISC_FEATURE (20)..(20): Xaa is absent, or if Xaa at (16) is Pro, Xaa is Ser
  MISC_FEATURE (21)..(21): Xaa is absent or Pro
  MISC_FEATURE (22)..(22): Xaa is absent, or if Xaa at (21) is Pro, Xaa is Gly
  MISC_FEATURE (23)..(23): Xaa is absent, or if Xaa at (21) is Pro, Xaa is Gly
  MISC_FEATURE (24)..(24): Xaa is absent, or if Xaa at (21) is Pro, Xaa is Gly
  MISC_FEATURE (25)..(25): Xaa is absent, or if Xaa at (21) is Pro, Xaa is Ser
  MISC_FEATURE (26)..(26): Xaa is absent or Pro
  MISC_FEATURE (27)..(27): Xaa is absent, or if Xaa at (26) is Pro, Xaa is Gly
  MISC_FEATURE (28)..(28): Xaa is absent, or if Xaa at (26) is Pro, Xaa is Gly
  MISC_FEATURE (29)..(29): Xaa is absent, or if Xaa at (26) is Pro, Xaa is Gly
  MISC_FEATURE (30)..(30): Xaa is absent, or if Xaa at (26) is Pro, Xaa is Ser
  MISC_FEATURE (31)..(31): Xaa is absent or Pro
  MISC_FEATURE (32)..(32): Xaa is absent, or if Xaa at (31) is Pro, Xaa is Gly
  MISC_FEATURE (33)..(33): Xaa is absent, or if Xaa at (31) is Pro, Xaa is Gly
  MISC_FEATURE (34)..(34): Xaa is absent, or if Xaa at (31) is Pro, Xaa is Gly
  MISC_FEATURE (35)..(35): Xaa is absent, or if Xaa at (31) is Pro, Xaa is Ser
  MISC_FEATURE (36)..(36): Xaa is absent or Pro
  MISC_FEATURE (37)..(37): Xaa is absent, or if Xaa at (36) is Pro, Xaa is Gly
  MISC_FEATURE (38)..(38): Xaa is absent, or if Xaa at (36) is Pro, Xaa is Gly
  MISC_FEATURE (39)..(39): Xaa is absent, or if Xaa at (36) is Pro, Xaa is Gly
  MISC_FEATURE (40)..(40): Xaa is absent, or if Xaa at (36) is Pro, Xaa is Ser
  MISC_FEATURE (41)..(41): Xaa is absent or Pro
  MISC_FEATURE (42)..(42): Xaa is absent, or if Xaa at (41) is Pro, Xaa is Gly
  MISC_FEATURE (43)..(43): Xaa is absent, or if Xaa at (41) is Pro, Xaa is Gly
  MISC_FEATURE (44)..(44): Xaa is absent, or if Xaa at (41) is Pro, Xaa is Gly
  MISC_FEATURE (45)..(45): Xaa is absent, or if Xaa at (41) is Pro, Xaa is Ser
  MISC_FEATURE (46)..(46): Xaa is absent or Pro
  MISC_FEATURE (47)..(47): Xaa is absent, or if Xaa at (46) is Pro, Xaa is Gly
  MISC_FEATURE (48)..(48): Xaa is absent, or if Xaa at (46) is Pro, Xaa is Gly
  MISC_FEATURE (49)..(49): Xaa is absent, or if Xaa at (46) is Pro, Xaa is Gly
  MISC_FEATURE (50)..(50): Xaa is absent, or if Xaa at (46) is Pro, Xaa is Ser
  MISC_FEATURE (51)..(51): Xaa is absent or Pro
  MISC_FEATURE (52)..(52): Xaa is absent, or if Xaa at (51) is Pro, Xaa is Gly
  MISC_FEATURE (53)..(53): Xaa is absent, or if Xaa at (51) is Pro, Xaa is Gly
  MISC_FEATURE (54)..(54): Xaa is absent, or if Xaa at (51) is Pro, Xaa is Gly
  MISC_FEATURE (55)..(55): Xaa is absent, or if Xaa at (51) is Pro, Xaa is Ser
  MISC_FEATURE (56)..(56): Xaa is absent or Pro
  MISC_FEATURE (57)..(57): Xaa is absent, or if Xaa at (56) is Pro, Xaa is Gly
  MISC_FEATURE (58)..(58): Xaa is absent, or if Xaa at (56) is Pro, Xaa is Gly
  MISC_FEATURE (59)..(59): Xaa is absent, or if Xaa at (56) is Pro, Xaa is Gly
  MISC_FEATURE (60)..(60): Xaa is absent, or if Xaa at (56) is Pro, Xaa is Ser
  MISC_FEATURE (61)..(61): Xaa is absent or Pro
  MISC_FEATURE (62)..(62): Xaa is absent, or if Xaa at (61) is Pro, Xaa is Gly
  MISC_FEATURE (63)..(63): Xaa is absent, or if Xaa at (61) is Pro, Xaa is Gly
  MISC_FEATURE (64)..(64): Xaa is absent, or if Xaa at (61) is Pro, Xaa is Gly
  MISC_FEATURE (65)..(65): Xaa is absent, or if Xaa at (61) is Pro, Xaa is Ser
  MISC_FEATURE (66)..(66): Xaa is absent or Pro
  MISC_FEATURE (67)..(67): Xaa is absent, or if Xaa at (66) is Pro, Xaa is Gly
  MISC_FEATURE (68)..(68): Xaa is absent, or if Xaa at (66) is Pro, Xaa is Gly
  MISC_FEATURE (69)..(69): Xaa is absent, or if Xaa at (66) is Pro, Xaa is Gly
  MISC_FEATURE (70)..(70): Xaa is absent, or if Xaa at (66) is Pro, Xaa is Ser
  MISC_FEATURE (71)..(71): Xaa is absent or Pro
  MISC_FEATURE (72)..(72): Xaa is absent, or if Xaa at (71) is Pro, Xaa is Gly
  MISC_FEATURE (73)..(73): Xaa is absent, or if Xaa at (71) is Pro, Xaa is Gly
  MISC_FEATURE (74)..(74): Xaa is absent, or if Xaa at (71) is Pro, Xaa is Gly
  MISC_FEATURE (75)..(75): Xaa is absent, or if Xaa at (71) is Pro, Xaa is Ser
  MISC_FEATURE (76)..(76): Xaa is absent or Pro
  MISC_FEATURE (77)..(77): Xaa is absent, or if Xaa at (76) is Pro, Xaa is Gly
  MISC_FEATURE (78)..(78): Xaa is absent, or if Xaa at (76) is Pro, Xaa is Gly
  MISC_FEATURE (79)..(79): Xaa is absent, or if Xaa at (76) is Pro, Xaa is Gly
  MISC_FEATURE (80)..(80): Xaa is absent, or if Xaa at (76) is Pro, Xaa is Ser
  MISC_FEATURE (81)..(81): Xaa is absent or Pro
  MISC_FEATURE (82)..(82): Xaa is absent, or if Xaa at (81) is Pro, Xaa is Gly
  MISC_FEATURE (83)..(83): Xaa is absent, or if Xaa at (81) is Pro, Xaa is Gly
  MISC_FEATURE (84)..(84): Xaa is absent, or if Xaa at (81) is Pro, Xaa is Gly
  MISC_FEATURE (85)..(85): Xaa is absent, or if Xaa at (81) is Pro, Xaa is Ser
  MISC_FEATURE (86)..(86): Xaa is absent or Pro
  MISC_FEATURE (87)..(87): Xaa is absent, or if Xaa at (86) is Pro, Xaa is Gly
  MISC_FEATURE (88)..(88): Xaa is absent, or if Xaa at (86) is Pro, Xaa is Gly
  MISC_FEATURE (89)..(89): Xaa is absent, or if Xaa at (86) is Pro, Xaa is Gly
  MISC_FEATURE (90)..(90): Xaa is absent, or if Xaa at (86) is Pro, Xaa is Ser
  MISC_FEATURE (91)..(91): Xaa is absent or Pro
  MISC_FEATURE (92)..(92): Xaa is absent, or if Xaa at (91) is Pro, Xaa is Gly
  MISC_FEATURE (93)..(93): Xaa is absent, or if Xaa at (91) is Pro, Xaa is Gly
  MISC_FEATURE (94)..(94): Xaa is absent, or if Xaa at (91) is Pro, Xaa is Gly
  MISC_FEATURE (95)..(95): Xaa is absent, or if Xaa at (91) is Pro, Xaa is Ser
  MISC_FEATURE (96)..(96): Xaa is absent or Pro
  MISC_FEATURE (97)..(97): Xaa is absent, or if Xaa at (96) is Pro, Xaa is Gly
  MISC_FEATURE (98)..(98): Xaa is absent, or if Xaa at (96) is Pro, Xaa is Gly
  MISC_FEATURE (99)..(99): Xaa is absent, or if Xaa at (96) is Pro, Xaa is Gly
  MISC_FEATURE (100)..(100): Xaa is absent, or if Xaa at (96) is Pro, Xaa is Ser
PGGGSPGGGSXXXXXXXXXXXXXXXXXXXXXXXXXXXXXXXXXXXXXXXXXXXXXXXXXXXXXXXXXXXXXXXXXXXXXXXXXXXXXXXXXXXXXXXXXX

SEQ ID NO: 329 - protein, 100 aa, Artificial Sequence
  Linker
  MISC_FEATURE (11)..(11): Xaa is absent or Ala
  MISC_FEATURE (12)..(12): Xaa is absent, or if Xaa at (11) is Ala, Xaa is Gly
  MISC_FEATURE (13)..(13): Xaa is absent, or if Xaa at (11) is Ala, Xaa is Gly
  MISC_FEATURE (14)..(14): Xaa is absent, or if Xaa at (11) is Ala, Xaa is Gly
  MISC_FEATURE (15)..(15): Xaa is absent, or if Xaa at (11) is Ala, Xaa is Ser
  MISC_FEATURE (16)..(16): Xaa is absent or Ala
  MISC_FEATURE (17)..(17): Xaa is absent, or if Xaa at (16) is Ala, Xaa is Gly
  MISC_FEATURE (18)..(18): Xaa is absent, or if Xaa at (16) is Ala, Xaa is Gly
  MISC_FEATURE (19)..(19): Xaa is absent, or if Xaa at (16) is Ala, Xaa is Gly
  MISC_FEATURE (20)..(20): Xaa is absent, or if Xaa at (16) is Ala, Xaa is Ser
  MISC_FEATURE (21)..(21): Xaa is absent or Ala
  MISC_FEATURE (22)..(22): Xaa is absent, or if Xaa at (21) is Ala, Xaa is Gly
  MISC_FEATURE (23)..(23): Xaa is absent, or if Xaa at (21) is Ala, Xaa is Gly
  MISC_FEATURE (24)..(24): Xaa is absent, or if Xaa at (21) is Ala, Xaa is Gly
  MISC_FEATURE (25)..(25): Xaa is absent, or if Xaa at (21) is Ala, Xaa is Ser
  MISC_FEATURE (26)..(26): Xaa is absent or Ala
  MISC_FEATURE (27)..(27): Xaa is absent, or if Xaa at (26) is Ala, Xaa is Gly
  MISC_FEATURE (28)..(28): Xaa is absent, or if Xaa at (26) is Ala, Xaa is Gly
  MISC_FEATURE (29)..(29): Xaa is absent, or if Xaa at (26) is Ala, Xaa is Gly
  MISC_FEATURE (30)..(30): Xaa is absent, or if Xaa at (26) is Ala, Xaa is Ser
  MISC_FEATURE (31)..(31): Xaa is absent or Ala
  MISC_FEATURE (32)..(32): Xaa is absent, or if Xaa at (31) is Ala, Xaa is Gly
  MISC_FEATURE (33)..(33): Xaa is absent, or if Xaa at (31) is Ala, Xaa is Gly
  MISC_FEATURE (34)..(34): Xaa is absent, or if Xaa at (31) is Ala, Xaa is Gly
  MISC_FEATURE (35)..(35): Xaa is absent, or if Xaa at (31) is Ala, Xaa is Ser
  MISC_FEATURE (36)..(36): Xaa is absent or Ala
  MISC_FEATURE (37)..(37): Xaa is absent, or if Xaa at (36) is Ala, Xaa is Gly
  MISC_FEATURE (38)..(38): Xaa is absent, or if Xaa at (36) is Ala, Xaa is Gly
  MISC_FEATURE (39)..(39): Xaa is absent, or if Xaa at (36) is Ala, Xaa is Gly
  MISC_FEATURE (40)..(40): Xaa is absent, or if Xaa at (36) is Ala, Xaa is Ser
  MISC_FEATURE (41)..(41): Xaa is absent or Ala
  MISC_FEATURE (42)..(42): Xaa is absent, or if Xaa at (41) is Ala, Xaa is Gly
  MISC_FEATURE (43)..(43): Xaa is absent, or if Xaa at (41) is Ala, Xaa is Gly
  MISC_FEATURE (44)..(44): Xaa is absent, or if Xaa at (41) is Ala, Xaa is Gly
  MISC_FEATURE (45)..(45): Xaa is absent, or if Xaa at (41) is Ala, Xaa is Ser
  MISC_FEATURE (46)..(46): Xaa is absent or Ala
  MISC_FEATURE (47)..(47): Xaa is absent, or if Xaa at (46) is Ala, Xaa is Gly
  MISC_FEATURE (48)..(48): Xaa is absent, or if Xaa at (46) is Ala, Xaa is Gly
  MISC_FEATURE (49)..(49): Xaa is absent, or if Xaa at (46) is Ala, Xaa is Gly
  MISC_FEATURE (50)..(50): Xaa is absent, or if Xaa at (46) is Ala, Xaa is Ser
  MISC_FEATURE (51)..(51): Xaa is absent or Ala
  MISC_FEATURE (52)..(52): Xaa is absent, or if Xaa at (51) is Ala, Xaa is Gly
  MISC_FEATURE (53)..(53): Xaa is absent, or if Xaa at (51) is Ala, Xaa is Gly
  MISC_FEATURE (54)..(54): Xaa is absent, or if Xaa at (51) is Ala, Xaa is Gly
  MISC_FEATURE (55)..(55): Xaa is absent, or if Xaa at (51) is Ala, Xaa is Ser
  MISC_FEATURE (56)..(56): Xaa is absent or Ala
  MISC_FEATURE (57)..(57): Xaa is absent, or if Xaa at (56) is Ala, Xaa is Gly
  MISC_FEATURE (58)..(58): Xaa is absent, or if Xaa at (56) is Ala, Xaa is Gly
  MISC_FEATURE (59)..(59): Xaa is absent, or if Xaa at (56) is Ala, Xaa is Gly
  MISC_FEATURE (60)..(60): Xaa is absent, or if Xaa at (56) is Ala, Xaa is Ser
  MISC_FEATURE (61)..(61): Xaa is absent or Ala
  MISC_FEATURE (62)..(62): Xaa is absent, or if Xaa at (61) is Ala, Xaa is Gly
  MISC_FEATURE (63)..(63): Xaa is absent, or if Xaa at (61) is Ala, Xaa is Gly
  MISC_FEATURE (64)..(64): Xaa is absent, or if Xaa at (61) is Ala, Xaa is Gly
  MISC_FEATURE (65)..(65): Xaa is absent, or if Xaa at (61) is Ala, Xaa is Ser
  MISC_FEATURE (66)..(66): Xaa is absent or Ala
  MISC_FEATURE (67)..(67): Xaa is absent, or if Xaa at (66) is Ala, Xaa is Gly
  MISC_FEATURE (68)..(68): Xaa is absent, or if Xaa at (66) is Ala, Xaa is Gly
  MISC_FEATURE (69)..(69): Xaa is absent, or if Xaa at (66) is Ala, Xaa is Gly
  MISC_FEATURE (70)..(70): Xaa is absent, or if Xaa at (66) is Ala, Xaa is Ser
  MISC_FEATURE (71)..(71): Xaa is absent or Ala
  MISC_FEATURE (72)..(72): Xaa is absent, or if Xaa at (71) is Ala, Xaa is Gly
  MISC_FEATURE (73)..(73): Xaa is absent, or if Xaa at (71) is Ala, Xaa is Gly
  MISC_FEATURE (74)..(74): Xaa is absent, or if Xaa at (71) is Ala, Xaa is Gly
  MISC_FEATURE (75)..(75): Xaa is absent, or if Xaa at (71) is Ala, Xaa is Ser
  MISC_FEATURE (76)..(76): Xaa is absent or Ala
  MISC_FEATURE (77)..(77): Xaa is absent, or if Xaa at (76) is Ala, Xaa is Gly
  MISC_FEATURE (78)..(78): Xaa is absent, or if Xaa at (76) is Ala, Xaa is Gly
  MISC_FEATURE (79)..(79): Xaa is absent, or if Xaa at (76) is Ala, Xaa is Gly
  MISC_FEATURE (80)..(80): Xaa is absent, or if Xaa at (76) is Ala, Xaa is Ser
  MISC_FEATURE (81)..(81): Xaa is absent or Ala
  MISC_FEATURE (82)..(82): Xaa is absent, or if Xaa at (81) is Ala, Xaa is Gly
  MISC_FEATURE (83)..(83): Xaa is absent, or if Xaa at (81) is Ala, Xaa is Gly
  MISC_FEATURE (84)..(84): Xaa is absent, or if Xaa at (81) is Ala, Xaa is Gly
  MISC_FEATURE (85)..(85): Xaa is absent, or if Xaa at (81) is Ala, Xaa is Ser
  MISC_FEATURE (86)..(86): Xaa is absent or Ala
  MISC_FEATURE (87)..(87): Xaa is absent, or if Xaa at (86) is Ala, Xaa is Gly
  MISC_FEATURE (88)..(88): Xaa is absent, or if Xaa at (86) is Ala, Xaa is Gly
  MISC_FEATURE (89)..(89): Xaa is absent, or if Xaa at (86) is Ala, Xaa is Gly
  MISC_FEATURE (90)..(90): Xaa is absent, or if Xaa at (86) is Ala, Xaa is Ser
  MISC_FEATURE (91)..(91): Xaa is absent or Ala
  MISC_FEATURE (92)..(92): Xaa is absent, or if Xaa at (91) is Ala, Xaa is Gly
  MISC_FEATURE (93)..(93): Xaa is absent, or if Xaa at (91) is Ala, Xaa is Gly
  MISC_FEATURE (94)..(94): Xaa is absent, or if Xaa at (91) is Ala, Xaa is Gly
  MISC_FEATURE (95)..(95): Xaa is absent, or if Xaa at (91) is Ala, Xaa is Ser
  MISC_FEATURE (96)..(96): Xaa is absent or Ala
  MISC_FEATURE (97)..(97): Xaa is absent, or if Xaa at (96) is Ala, Xaa is Gly
  MISC_FEATURE (98)..(98): Xaa is absent, or if Xaa at (96) is Ala, Xaa is Gly
  MISC_FEATURE (99)..(99): Xaa is absent, or if Xaa at (96) is Ala, Xaa is Gly
  MISC_FEATURE (100)..(100): Xaa is absent, or if Xaa at (96) is Ala, Xaa is Ser
AGGGSAGGGSXXXXXXXXXXXXXXXXXXXXXXXXXXXXXXXXXXXXXXXXXXXXXXXXXXXXXXXXXXXXXXXXXXXXXXXXXXXXXXXXXXXXXXXXXX

SEQ ID NO: 330 - protein, 286 aa, Artificial Sequence
  Linker
  MISC_FEATURE (32)..(32): Xaa is absent or Glu
  MISC_FEATURE (33)..(33): Xaa is absent, or if Xaa at (32) is Glu, Xaa is Gly
  MISC_FEATURE (34)..(34): Xaa is absent, or if Xaa at (32) is Glu, Xaa is Lys
  MISC_FEATURE (35)..(35): Xaa is absent, or if Xaa at (32) is Glu, Xaa is Ser
  MISC_FEATURE (36)..(36): Xaa is absent, or if Xaa at (32) is Glu, Xaa is Ser
  MISC_FEATURE (37)..(37): Xaa is absent, or if Xaa at (32) is Glu, Xaa is Gly
  MISC_FEATURE (38)..(38): Xaa is absent, or if Xaa at (32) is Glu, Xaa is Ser
  MISC_FEATURE (39)..(39): Xaa is absent, or if Xaa at (32) is Glu, Xaa is Gly
  MISC_FEATURE (40)..(40): Xaa is absent, or if Xaa at (32) is Glu, Xaa is Ser
  MISC_FEATURE (41)..(41): Xaa is absent, or if Xaa at (32) is Glu, Xaa is Glu
  MISC_FEATURE (42)..(42): Xaa is absent, or if Xaa at (32) is Glu, Xaa is Ser
  MISC_FEATURE (43)..(43): Xaa is absent, or if Xaa at (32) is Glu, Xaa is Lys
  MISC_FEATURE (44)..(44): Xaa is absent, or if Xaa at (32) is Glu, Xaa is Ser
  MISC_FEATURE (45)..(45): Xaa is absent, or if Xaa at (32) is Glu, Xaa is Thr
  MISC_FEATURE (46)..(46): Xaa is absent or Glu
  MISC_FEATURE (47)..(47): Xaa is absent, or if Xaa at (46) is Glu, Xaa is Gly
  MISC_FEATURE (48)..(48): Xaa is absent, or if Xaa at (46) is Glu, Xaa is Lys
  MISC_FEATURE (49)..(49): Xaa is absent, or if Xaa at (46) is Glu, Xaa is Ser
  MISC_FEATURE (50)..(50): Xaa is absent, or if Xaa at (46) is Glu, Xaa is Ser
  MISC_FEATURE (51)..(51): Xaa is absent, or if Xaa at (46) is Glu, Xaa is Gly
  MISC_FEATURE (52)..(52): Xaa is absent, or if Xaa at (46) is Glu, Xaa is Ser
  MISC_FEATURE (53)..(53): Xaa is absent, or if Xaa at (46) is Glu, Xaa is Gly
  MISC_FEATURE (54)..(54): Xaa is absent, or if Xaa at (46) is Glu, Xaa is Ser
  MISC_FEATURE (55)..(55): Xaa is absent, or if Xaa at (46) is Glu, Xaa is Glu
  MISC_FEATURE (56)..(56): Xaa is absent, or if Xaa at (46) is Glu, Xaa is Ser
  MISC_FEATURE (57)..(57): Xaa is absent, or if Xaa at (46) is Glu, Xaa is Lys
  MISC_FEATURE (58)..(58): Xaa is absent, or if Xaa at (46) is Glu, Xaa is Ser
  MISC_FEATURE (59)..(59): Xaa is absent, or if Xaa at (46) is Glu, Xaa is Thr
  MISC_FEATURE (60)..(60): Xaa is absent or Glu
  MISC_FEATURE (61)..(61): Xaa is absent, or if Xaa at (60) is Glu, Xaa is Gly
  MISC_FEATURE (62)..(62): Xaa is absent, or if Xaa at (60) is Glu, Xaa is Lys
  MISC_FEATURE (63)..(63): Xaa is absent, or if Xaa at (60) is Glu, Xaa is Ser
  MISC_FEATURE (64)..(64): Xaa is absent, or if Xaa at (60) is Glu, Xaa is Ser
  MISC_FEATURE (65)..(65): Xaa is absent, or if Xaa at (60) is Glu, Xaa is Gly
  MISC_FEATURE (66)..(66): Xaa is absent, or if Xaa at (60) is Glu, Xaa is Ser
  MISC_FEATURE (67)..(67): Xaa is absent, or if Xaa at (60) is Glu, Xaa is Gly
  MISC_FEATURE (68)..(68): Xaa is absent, or if Xaa at (60) is Glu, Xaa is Ser
  MISC_FEATURE (69)..(69): Xaa is absent, or if Xaa at (60) is Glu, Xaa is Glu
  MISC_FEATURE (70)..(70): Xaa is absent, or if Xaa at (60) is Glu, Xaa is Ser
  MISC_FEATURE (71)..(71): Xaa is absent, or if Xaa at (60) is Glu, Xaa is Lys
  MISC_FEATURE (72)..(72): Xaa is absent, or if Xaa at (60) is Glu, Xaa is Ser
  MISC_FEATURE (73)..(73): Xaa is absent, or if Xaa at (60) is Glu, Xaa is Thr
  MISC_FEATURE (74)..(74): Xaa is absent or Glu
  MISC_FEATURE (75)..(75): Xaa is absent, or if Xaa at (74) is Glu, Xaa is Gly
  MISC_FEATURE (76)..(76): Xaa is absent, or if Xaa at (74) is Glu, Xaa is Lys
  MISC_FEATURE (77)..(77): Xaa is absent, or if Xaa at (74) is Glu, Xaa is Ser
  MISC_FEATURE (78)..(78): Xaa is absent, or if Xaa at (74) is Glu, Xaa is Ser
  MISC_FEATURE (79)..(79): Xaa is absent, or if Xaa at (74) is Glu, Xaa is Gly
  MISC_FEATURE (80)..(80): Xaa is absent, or if Xaa at (74) is Glu, Xaa is Ser
  MISC_FEATURE (81)..(81): Xaa is absent, or if Xaa at (74) is Glu, Xaa is Gly
  MISC_FEATURE (82)..(82): Xaa is absent, or if Xaa at (74) is Glu, Xaa is Ser
  MISC_FEATURE (83)..(83): Xaa is absent, or if Xaa at (74) is Glu, Xaa is Glu
  MISC_FEATURE (84)..(84): Xaa is absent, or if Xaa at (74) is Glu, Xaa is Ser
  MISC_FEATURE (85)..(85): Xaa is absent, or if Xaa at (74) is Glu, Xaa is Lys
  MISC_FEATURE (86)..(86): Xaa is absent, or if Xaa at (74) is Glu, Xaa is Ser
  MISC_FEATURE (87)..(87): Xaa is absent, or if Xaa at (74) is Glu, Xaa is Thr
  MISC_FEATURE (88)..(88): Xaa is absent or Glu
  MISC_FEATURE (89)..(89): Xaa is absent, or if Xaa at (88) is Glu, Xaa is Gly
  MISC_FEATURE (90)..(90): Xaa is absent, or if Xaa at (88) is Glu, Xaa is Lys
  MISC_FEATURE (91)..(91): Xaa is absent, or if Xaa at (88) is Glu, Xaa is Ser
  MISC_FEATURE (92)..(92): Xaa is absent, or if Xaa at (88) is Glu, Xaa is Ser
  MISC_FEATURE (93)..(93): Xaa is absent, or if Xaa at (88) is Glu, Xaa is Gly
  MISC_FEATURE (94)..(94): Xaa is absent, or if Xaa at (88) is Glu, Xaa is Ser
  MISC_FEATURE (95)..(95): Xaa is absent, or if Xaa at (88) is Glu, Xaa is Gly
  MISC_FEATURE (96)..(96): Xaa is absent, or if Xaa at (88) is Glu, Xaa is Ser
  MISC_FEATURE (97)..(97): Xaa is absent, or if Xaa at (88) is Glu, Xaa is Glu
  MISC_FEATURE (98)..(98): Xaa is absent, or if Xaa at (88) is Glu, Xaa is Ser
  MISC_FEATURE (99)..(99): Xaa is absent, or if Xaa at (88) is Glu, Xaa is Lys
  MISC_FEATURE (100)..(100): Xaa is absent, or if Xaa at (88) is Glu, Xaa is Ser
  MISC_FEATURE (101)..(101): Xaa is absent, or if Xaa at (88) is Glu, Xaa is Thr
  MISC_FEATURE (102)..(102): Xaa is absent or Glu
  MISC_FEATURE (103)..(103): Xaa is absent, or if Xaa at (102) is Glu, Xaa is Gly
  MISC_FEATURE (104)..(104): Xaa is absent, or if Xaa at (102) is Glu, Xaa is Lys
  MISC_FEATURE (105)..(105): Xaa is absent, or if Xaa at (102) is Glu, Xaa is Ser
  MISC_FEATURE (106)..(106): Xaa is absent, or if Xaa at (102) is Glu, Xaa is Ser
  MISC_FEATURE (107)..(107): Xaa is absent, or if Xaa at (102) is Glu, Xaa is Gly
  MISC_FEATURE (108)..(108): Xaa is absent, or if Xaa at (102) is Glu, Xaa is Ser
  MISC_FEATURE (109)..(109): Xaa is absent, or if Xaa at (102) is Glu, Xaa is Gly
  MISC_FEATURE (110)..(110): Xaa is absent, or if Xaa at (102) is Glu, Xaa is Ser
  MISC_FEATURE (111)..(111): Xaa is absent, or if Xaa at (102) is Glu, Xaa is Glu
  MISC_FEATURE (112)..(112): Xaa is absent, or if Xaa at (102) is Glu, Xaa is Ser
  MISC_FEATURE (113)..(113): Xaa is absent, or if Xaa at (102) is Glu, Xaa is Lys
  MISC_FEATURE (114)..(114): Xaa is absent, or if Xaa at (102) is Glu, Xaa is Ser
  MISC_FEATURE (115)..(115): Xaa is absent, or if Xaa at (102) is Glu, Xaa is Thr
  MISC_FEATURE (116)..(116): Xaa is absent or Glu
  MISC_FEATURE (117)..(117): Xaa is absent, or if Xaa at (116) is Glu, Xaa is Gly
  MISC_FEATURE (118)..(118): Xaa is absent, or if Xaa at (116) is Glu, Xaa is Lys
  MISC_FEATURE (119)..(119): Xaa is absent, or if Xaa at (116) is Glu, Xaa is Ser
  MISC_FEATURE (120)..(120): Xaa is absent, or if Xaa at (116) is Glu, Xaa is Ser
  MISC_FEATURE (121)..(121): Xaa is absent, or if Xaa at (116) is Glu, Xaa is Gly
  MISC_FEATURE (122)..(122): Xaa is absent, or if Xaa at (116) is Glu, Xaa is Ser
  MISC_FEATURE (123)..(123): Xaa is absent, or if Xaa at (116) is Glu, Xaa is Gly
  MISC_FEATURE (124)..(124): Xaa is absent, or if Xaa at (116) is Glu, Xaa is Ser
  MISC_FEATURE (125)..(125): Xaa is absent, or if Xaa at (116) is Glu, Xaa is Glu
  MISC_FEATURE (126)..(126): Xaa is absent, or if Xaa at (116) is Glu, Xaa is Ser
  MISC_FEATURE (127)..(127): Xaa is absent, or if Xaa at (116) is Glu, Xaa is Lys
  MISC_FEATURE (128)..(128): Xaa is absent, or if Xaa at (116) is Glu, Xaa is Ser
  MISC_FEATURE (129)..(129): Xaa is absent, or if Xaa at (116) is Glu, Xaa is Thr
  MISC_FEATURE (130)..(130): Xaa is absent or Glu
  MISC_FEATURE (131)..(131): Xaa is absent, or if Xaa at (130) is Glu, Xaa is Gly
  MISC_FEATURE (132)..(132): Xaa is absent, or if Xaa at (130) is Glu, Xaa is Lys
  MISC_FEATURE (133)..(133): Xaa is absent, or if Xaa at (130) is Glu, Xaa is Ser
  MISC_FEATURE (134)..(134): Xaa is absent, or if Xaa at (130) is Glu, Xaa is Ser
  MISC_FEATURE (135)..(135): Xaa is absent, or if Xaa at (130) is Glu, Xaa is Gly
  MISC_FEATURE (136)..(136): Xaa is absent, or if Xaa at (130) is Glu, Xaa is Ser
  MISC_FEATURE (137)..(137): Xaa is absent, or if Xaa at (130) is Glu, Xaa is Gly
  MISC_FEATURE (138)..(138): Xaa is absent, or if Xaa at (130) is Glu, Xaa is Ser
  MISC_FEATURE (139)..(139): Xaa is absent, or if Xaa at (130) is Glu, Xaa is Glu
  MISC_FEATURE (140)..(140): Xaa is absent, or if Xaa at (130) is Glu, Xaa is Ser
  MISC_FEATURE (141)..(141): Xaa is absent, or if Xaa at (130) is Glu, Xaa is Lys
  MISC_FEATURE (142)..(142): Xaa is absent, or if Xaa at (130) is Glu, Xaa is Ser
  MISC_FEATURE (143)..(143): Xaa is absent, or if Xaa at (130) is Glu, Xaa is Thr
  MISC_FEATURE (144)..(144): Xaa is absent or Glu
  MISC_FEATURE (145)..(145): Xaa is absent, or if Xaa at (144) is Glu, Xaa is Gly
  MISC_FEATURE (146)..(146): Xaa is absent, or if Xaa at (144) is Glu, Xaa is Lys
  MISC_FEATURE (147)..(147): Xaa is absent, or if Xaa at (144) is Glu, Xaa is Ser
  MISC_FEATURE (148)..(148): Xaa is absent, or if Xaa at (144) is Glu, Xaa is Ser
  MISC_FEATURE (149)..(149): Xaa is absent, or if Xaa at (144) is Glu, Xaa is Gly
  MISC_FEATURE (150)..(150): Xaa is absent, or if Xaa at (144) is Glu, Xaa is Ser
  MISC_FEATURE (151)..(151): Xaa is absent, or if Xaa at (144) is Glu, Xaa is Gly
  MISC_FEATURE (152)..(152): Xaa is absent, or if Xaa at (144) is Glu, Xaa is Ser
  MISC_FEATURE (153)..(153): Xaa is absent, or if Xaa at (144) is Glu, Xaa is Glu
  MISC_FEATURE (154)..(154): Xaa is absent, or if Xaa at (144) is Glu, Xaa is Ser
  MISC_FEATURE (155)..(155): Xaa is absent, or if Xaa at (144) is Glu, Xaa is Lys
  MISC_FEATURE (156)..(156): Xaa is absent, or if Xaa at (144) is Glu, Xaa is Ser
  MISC_FEATURE (157)..(157): Xaa is absent, or if Xaa at (144) is Glu, Xaa is Thr
  MISC_FEATURE (158)..(158): Xaa is absent or Glu
  MISC_FEATURE (159)..(159): Xaa is absent, or if Xaa at (158) is Glu, Xaa is Gly
  MISC_FEATURE (160)..(160): Xaa is absent, or if Xaa at (158) is Glu, Xaa is Lys
  MISC_FEATURE (161)..(161): Xaa is absent, or if Xaa at (158) is Glu, Xaa is Ser
  MISC_FEATURE (162)..(162): Xaa is absent, or if Xaa at (158) is Glu, Xaa is Ser
  MISC_FEATURE (163)..(163): Xaa is absent, or if Xaa at (158) is Glu, Xaa is Gly
  MISC_FEATURE (164)..(164): Xaa is absent, or if Xaa at (158) is Glu, Xaa is Ser
  MISC_FEATURE (165)..(165): Xaa is absent, or if Xaa at (158) is Glu, Xaa is Gly
  MISC_FEATURE (166)..(166): Xaa is absent, or if Xaa at (158) is Glu, Xaa is Ser
  MISC_FEATURE (167)..(167): Xaa is absent, or if Xaa at (158) is Glu, Xaa is Glu
  MISC_FEATURE (168)..(168): Xaa is absent, or if Xaa at (158) is Glu, Xaa is Ser
  MISC_FEATURE (169)..(169): Xaa is absent, or if Xaa at (158) is Glu, Xaa is Lys
  MISC_FEATURE (170)..(170): Xaa is absent, or if Xaa at (158) is Glu, Xaa is Ser
  MISC_FEATURE (171)..(171): Xaa is absent, or if Xaa at (158) is Glu, Xaa is Thr
  MISC_FEATURE (172)..(172): Xaa is absent or Glu
  MISC_FEATURE (173)..(173): Xaa is absent, or if Xaa at (172) is Glu, Xaa is Gly
  MISC_FEATURE (174)..(174): Xaa is absent, or if Xaa at (172) is Glu, Xaa is Lys
  MISC_FEATURE (175)..(175): Xaa is absent, or if Xaa at (172) is Glu, Xaa is Ser
  MISC_FEATURE (176)..(176): Xaa is absent, or if Xaa at (172) is Glu, Xaa is Ser
  MISC_FEATURE (177)..(177): Xaa is absent, or if Xaa at (172) is Glu, Xaa is Gly
  MISC_FEATURE (178)..(178): Xaa is absent, or if Xaa at (172) is Glu, Xaa is Ser
  MISC_FEATURE (179)..(179): Xaa is absent, or if Xaa at (172) is Glu, Xaa is Gly
  MISC_FEATURE (180)..(180): Xaa is absent, or if Xaa at (172) is Glu, Xaa is Ser
  MISC_FEATURE (181)..(181): Xaa is absent, or if Xaa at (172) is Glu, Xaa is Glu
  MISC_FEATURE (182)..(182): Xaa is absent, or if Xaa at (172) is Glu, Xaa is Ser
  MISC_FEATURE (183)..(183): Xaa is absent, or if Xaa at (172) is Glu, Xaa is Lys
  MISC_FEATURE (184)..(184): Xaa is absent, or if Xaa at (172) is Glu, Xaa is Ser
  MISC_FEATURE (185)..(185): Xaa is absent, or if Xaa at (172) is Glu, Xaa is Thr
  MISC_FEATURE (186)..(186): Xaa is absent or Glu
  MISC_FEATURE (187)..(187): Xaa is absent, or if Xaa at (186) is Glu, Xaa is Gly
  MISC_FEATURE (188)..(188): Xaa is absent, or if Xaa at (186) is Glu, Xaa is Lys
  MISC_FEATURE (189)..(189): Xaa is absent, or if Xaa at (186) is Glu, Xaa is Ser
  MISC_FEATURE (190)..(190): Xaa is absent, or if Xaa at (186) is Glu, Xaa is Ser
  MISC_FEATURE (191)..(191): Xaa is absent, or if Xaa at (186) is Glu, Xaa is Gly
  MISC_FEATURE (192)..(192): Xaa is absent, or if Xaa at (186) is Glu, Xaa is Ser
  MISC_FEATURE (193)..(193): Xaa is absent, or if Xaa at (186) is Glu, Xaa is Gly
  MISC_FEATURE (194)..(194): Xaa is absent, or if Xaa at (186) is Glu, Xaa is Ser
  MISC_FEATURE (195)..(195): Xaa is absent, or if Xaa at (186) is Glu, Xaa is Glu
  MISC_FEATURE (196)..(196): Xaa is absent, or if Xaa at (186) is Glu, Xaa is Ser
  MISC_FEATURE (197)..(197): Xaa is absent, or if Xaa at (186) is Glu, Xaa is Lys
  MISC_FEATURE (198)..(198): Xaa is absent, or if Xaa at (186) is Glu, Xaa is Ser
  MISC_FEATURE (199)..(199): Xaa is absent, or if Xaa at (186) is Glu, Xaa is Thr
  MISC_FEATURE (200)..(200): Xaa is absent or Glu
  MISC_FEATURE (201)..(201): Xaa is absent, or if Xaa at (200) is Glu, Xaa is Gly
  MISC_FEATURE (202)..(202): Xaa is absent, or if Xaa at (200) is Glu, Xaa is Lys
  MISC_FEATURE (203)..(203): Xaa is absent, or if Xaa at (200) is Glu, Xaa is Ser
  MISC_FEATURE (204)..(204): Xaa is absent, or if Xaa at (200) is Glu, Xaa is Ser
  MISC_FEATURE (205)..(205): Xaa is absent, or if Xaa at (200) is Glu, Xaa is Gly
  MISC_FEATURE (206)..(206): Xaa is absent, or if Xaa at (200) is Glu, Xaa is Ser
  MISC_FEATURE (207)..(207): Xaa is absent, or if Xaa at (200) is Glu, Xaa is Gly
  MISC_FEATURE (208)..(208): Xaa is absent, or if Xaa at (200) is Glu, Xaa is Ser
  MISC_FEATURE (209)..(209): Xaa is absent, or if Xaa at (200) is Glu, Xaa is Glu
  MISC_FEATURE (210)..(210): Xaa is absent, or if Xaa at (200) is Glu, Xaa is Ser
  MISC_FEATURE (211)..(211): Xaa is absent, or if Xaa at (200) is Glu, Xaa is Lys
  MISC_FEATURE (212)..(212): Xaa is absent, or if Xaa at (200) is Glu, Xaa is Ser
  MISC_FEATURE (213)..(213): Xaa is absent, or if Xaa at (200) is Glu, Xaa is Thr
  MISC_FEATURE (214)..(214): Xaa is absent or Glu
  MISC_FEATURE (215)..(215): Xaa is absent, or if Xaa at (214) is Glu, Xaa is Gly
  MISC_FEATURE (216)..(216): Xaa is absent, or if Xaa at (214) is Glu, Xaa is Lys
  MISC_FEATURE (217)..(217): Xaa is absent, or if Xaa at (214) is Glu, Xaa is Ser
  MISC_FEATURE (218)..(218): Xaa is absent, or if Xaa at (214) is Glu, Xaa is Ser
  MISC_FEATURE (219)..(219): Xaa is absent, or if Xaa at (214) is Glu, Xaa is Gly
  MISC_FEATURE (220)..(220): Xaa is absent, or if Xaa at (214) is Glu, Xaa is Ser
  MISC_FEATURE (221)..(221): Xaa is absent, or if Xaa at (214) is Glu, Xaa is Gly
  MISC_FEATURE (222)..(222): Xaa is absent, or if Xaa at (214) is Glu, Xaa is Ser
  MISC_FEATURE (223)..(223): Xaa is absent, or if Xaa at (214) is Glu, Xaa is Glu
  MISC_FEATURE (224)..(224): Xaa is absent, or if Xaa at (214) is Glu, Xaa is Ser
  MISC_FEATURE (225)..(225): Xaa is absent, or if Xaa at (214) is Glu, Xaa is Lys
  MISC_FEATURE (226)..(226): Xaa is absent, or if Xaa at (214) is Glu, Xaa is Ser
  MISC_FEATURE (227)..(227): Xaa is absent, or if Xaa at (214) is Glu, Xaa is Thr
  MISC_FEATURE (228)..(228): Xaa is absent or Glu
  MISC_FEATURE (229)..(229): Xaa is absent, or if Xaa at (228) is Glu, Xaa is Gly
  MISC_FEATURE (230)..(230): Xaa is absent, or if Xaa at (228) is Glu, Xaa is Lys
  MISC_FEATURE (231)..(231): Xaa is absent, or if Xaa at (228) is Glu, Xaa is Ser
  MISC_FEATURE (232)..(232): Xaa is absent, or if Xaa at (228) is Glu, Xaa is Ser
  MISC_FEATURE (233)..(233): Xaa is absent, or if Xaa at (228) is Glu, Xaa is Gly
  MISC_FEATURE (234)..(234): Xaa is absent, or if Xaa at (228) is Glu, Xaa is Ser
  MISC_FEATURE (235)..(235): Xaa is absent, or if Xaa at (228) is Glu, Xaa is Gly
  MISC_FEATURE (236)..(236): Xaa is absent, or if Xaa at (228) is Glu, Xaa is Ser
  MISC_FEATURE (237)..(237): Xaa is absent, or if Xaa at (228) is Glu, Xaa is Glu
  MISC_FEATURE (238)..(238): Xaa is absent, or if Xaa at (228) is Glu, Xaa is Ser
  MISC_FEATURE (239)..(239): Xaa is absent, or if Xaa at (228) is Glu, Xaa is Lys
  MISC_FEATURE (240)..(240): Xaa is absent, or if Xaa at (228) is Glu, Xaa is Ser
  MISC_FEATURE (241)..(241): Xaa is absent, or if Xaa at (228) is Glu, Xaa is Thr
  MISC_FEATURE (242)..(242): Xaa is absent or Glu
  MISC_FEATURE (243)..(243): Xaa is absent, or if Xaa at (242) is Glu, Xaa is Gly
  MISC_FEATURE (244)..(244): Xaa is absent, or if Xaa at (242) is Glu, Xaa is Lys
  MISC_FEATURE (245)..(245): Xaa is absent, or if Xaa at (242) is Glu, Xaa is Ser
  MISC_FEATURE (246)..(246): Xaa is absent, or if Xaa at (242) is Glu, Xaa is Ser
  MISC_FEATURE (247)..(247): Xaa is absent, or if Xaa at (242) is Glu, Xaa is Gly
  MISC_FEATURE (248)..(248): Xaa is absent, or if Xaa at (242) is Glu, Xaa is Ser
  MISC_FEATURE (249)..(249): Xaa is absent, or if Xaa at (242) is Glu, Xaa is Gly
  MISC_FEATURE (250)..(250): Xaa is absent, or if Xaa at (242) is Glu, Xaa is Ser
  MISC_FEATURE (251)..(251): Xaa is absent, or if Xaa at (242) is Glu, Xaa is Glu
  MISC_FEATURE (252)..(252): Xaa is absent, or if Xaa at (242) is Glu, Xaa is Ser
  MISC_FEATURE (253)..(253): Xaa is absent, or if Xaa at (242) is Glu, Xaa is Lys
  MISC_FEATURE (254)..(254): Xaa is absent, or if Xaa at (242) is Glu, Xaa is Ser
  MISC_FEATURE (255)..(255): Xaa is absent, or if Xaa at (242) is Glu, Xaa is Thr
  MISC_FEATURE (256)..(256): Xaa is absent or Glu
  MISC_FEATURE (257)..(257): Xaa is absent, or if Xaa at (256) is Glu, Xaa is Gly
  MISC_FEATURE (258)..(258): Xaa is absent, or if Xaa at (256) is Glu, Xaa is Lys
  MISC_FEATURE (259)..(259): Xaa is absent, or if Xaa at (256) is Glu, Xaa is Ser
  MISC_FEATURE (260)..(260): Xaa is absent, or if Xaa at (256) is Glu, Xaa is Ser
  MISC_FEATURE (261)..(261): Xaa is absent, or if Xaa at (256) is Glu, Xaa is Gly
  MISC_FEATURE (262)..(262): Xaa is absent, or if Xaa at (256) is Glu, Xaa is Ser
  MISC_FEATURE (263)..(263): Xaa is absent, or if Xaa at (256) is Glu, Xaa is Gly
  MISC_FEATURE (264)..(264): Xaa is absent, or if Xaa at (256) is Glu, Xaa is Ser
  MISC_FEATURE (265)..(265): Xaa is absent, or if Xaa at (256) is Glu, Xaa is Glu
  MISC_FEATURE (266)..(266): Xaa is absent, or if Xaa at (256) is Glu, Xaa is Ser
  MISC_FEATURE (267)..(267): Xaa is absent, or if Xaa at (256) is Glu, Xaa is Lys
  MISC_FEATURE (268)..(268): Xaa is absent, or if Xaa at (256) is Glu, Xaa is Ser
  MISC_FEATURE (269)..(269): Xaa is absent, or if Xaa at (256) is Glu, Xaa is Thr
  MISC_FEATURE (270)..(270): Xaa is absent or Glu
  MISC_FEATURE (271)..(271): Xaa is absent, or if Xaa at (270) is Glu, Xaa is Gly
  MISC_FEATURE (272)..(272): Xaa is absent, or if Xaa at (270) is Glu, Xaa is Lys
  MISC_FEATURE (273)..(273): Xaa is absent, or if Xaa at (270) is Glu, Xaa is Ser
  MISC_FEATURE (274)..(274): Xaa is absent, or if Xaa at (270) is Glu, Xaa is Ser
  MISC_FEATURE (275)..(275): Xaa is absent, or if Xaa at (270) is Glu, Xaa is Gly
  MISC_FEATURE (276)..(276): Xaa is absent, or if Xaa at (270) is Glu, Xaa is Ser
  MISC_FEATURE (277)..(277): Xaa is absent, or if Xaa at (270) is Glu, Xaa is Gly
  MISC_FEATURE (278)..(278): Xaa is absent, or if Xaa at (270) is Glu, Xaa is Ser
  MISC_FEATURE (279)..(279): Xaa is absent, or if Xaa at (270) is Glu, Xaa is Glu
  MISC_FEATURE (280)..(280): Xaa is absent, or if Xaa at (270) is Glu, Xaa is Ser
  MISC_FEATURE (281)..(281): Xaa is absent, or if Xaa at (270) is Glu, Xaa is Lys
  MISC_FEATURE (282)..(282): Xaa is absent, or if Xaa at (270) is Glu, Xaa is Ser
  MISC_FEATURE (283)..(283): Xaa is absent, or if Xaa at (270) is Glu, Xaa is Thr
GGSEGKSSGSGSESKSTEGKSSGSGSESKSTXXXXXXXXXXXXXXXXXXXXXXXXXXXXXXXXXXXXXXXXXXXXXXXXXXXXXXXXXXXXXXXXXXXXXXXXXXXXXXXXXXXXXXXXXXXXXXXXXXXXXXXXXXXXXXXXXXXXXXXXXXXXXXXXXXXXXXXXXXXXXXXXXXXXXXXXXXXXXXXXXXXXXXXXXXXXXXXXXXXXXXXXXXXXXXXXXXXXXXXXXXXXXXXXXXXXXXXXXXXXXXXXXXXXXXXXXXXXXXXXXXXXXXXXXXXXGGS

SEQ ID NO: 331 - protein, 9 aa, Artificial Sequence
  Linker
SSSASASSA

SEQ ID NO: 332 - protein, 7 aa, Artificial Sequence
  Linker
GSPGSPG

SEQ ID NO: 333 - protein, 11 aa, Artificial Sequence
  Linker
ATTTGSSPGPT

SEQ ID NO: 334 - protein, 5 aa, Artificial Sequence
  VARIANT 1: Xaa is I, L, Y, M, F, V, or A
  VARIANT 2: Xaa is A, G, S, V, E, D, Q, N, or Y
  VARIANT 3: Xaa is H, P, A, V, G, S, or T
  VARIANT 4: Xaa is D or E
  VARIANT 5: Xaa is I, L, Y, M, F, V, T, S, G or A
  Linker consensus
XXXXX

SEQ ID NO: 335 - protein, 5 aa, Artificial Sequence
  VARIANT 1: Xaa is I or L
  VARIANT 3: Xaa is P or A
  VARIANT 5: Xaa is I, V, T, S, or G
  Linker consensus
XEXDX

SEQ ID NO: 336 - protein, 4 aa, Artificial Sequence
  granzyme B substrate
LEAD

SEQ ID NO: 337 - protein, 4 aa, Artificial Sequence
  Linker
LEPD

SEQ ID NO: 338 - protein, 4 aa, Artificial Sequence
  Linker
LEAE

SEQ ID NO: 339 - protein, 5 aa, Artificial Sequence
  Linker
IEPDI

SEQ ID NO: 340 - protein, 5 aa, Artificial Sequence
  Linker
LEPDG

SEQ ID NO: 341 - protein, 5 aa, Artificial Sequence
  Linker
LEADT

SEQ ID NO: 342 - protein, 5 aa, Artificial Sequence
  Linker
IEPDG

SEQ ID NO: 343 - protein, 5 aa, Artificial Sequence
  Linker
IEPDV

SEQ ID NO: 344 - protein, 5 aa, Artificial Sequence
  Linker
IEPDS

SEQ ID NO: 345 - protein, 5 aa, Artificial Sequence
  Linker
IEPDT

SEQ ID NO: 346 - protein, 5 aa, Artificial Sequence
  VARIANT 1: Xaa is any amino acid
  VARIANT 5: Xaa is A or V
  Linker consensus
XQARX

SEQ ID NO: 347 - protein, 5 aa, Artificial Sequence
  VARIANT 5: Xaa is A or V
  Linker
RQARX

SEQ ID NO: 348 - protein, 4 aa, Artificial Sequence
  matriptase substrate
RQAR

SEQ ID NO: 349 - protein, 5 aa, Artificial Sequence
  Linker
RQARV

SEQ ID NO: 350 - protein, 4 aa, Artificial Sequence
  VARIANT 1: Xaa is P, V, or A
  VARIANT 2: Xaa is Q or D
  VARIANT 3: Xaa is A or N
  VARIANT 4: Xaa is L, I, or M
  Linker consensus
XXXX

SEQ ID NO: 351 - protein, 4 aa, Artificial Sequence
  VARIANT 2: Xaa is Q or D
  VARIANT 3: Xaa is A or N
  VARIANT 4: Xaa is L or I
  Linker consensus
PXXX

SEQ ID NO: 352 - protein, 4 aa, Artificial Sequence
  MMP substrate
PAGL

SEQ ID NO: 353 - protein, 19 aa, Artificial Sequence
  Linker
TGLEADGSPAGLGRQARVG

SEQ ID NO: 354 - protein, 19 aa, Artificial Sequence
  Linker
TGLEADGSRQARVGPAGLG

SEQ ID NO: 355 - protein, 19 aa, Artificial Sequence
  Linker
TGSPAGLEADGSRQARVGS

SEQ ID NO: 356 - protein, 19 aa, Artificial Sequence
  Linker
TGPAGLGLEADGSRQARVG

SEQ ID NO: 357 - protein, 19 aa, Artificial Sequence
  Linker
TGRQARVGLEADGSPAGLG

SEQ ID NO: 358 - protein, 18 aa, Artificial Sequence
  Linker
TGSRQARVGPAGLEADGS

SEQ ID NO: 359 - protein, 20 aa, Artificial Sequence
  Linker
TGPAGLGSRQARVGLEADGS

SEQ ID NO: 360 - protein, 18 aa, Artificial Sequence
  Linker
GPAGLGLEPDGSRQARVG

SEQ ID NO: 361 - protein, 18 aa, Artificial Sequence
  Linker
GGSGGGGIEPDIGGSGGS

SEQ ID NO: 362 - protein, 18 aa, Artificial Sequence
  Linker
GGSGGGGLEADTGGSGGS

SEQ ID NO: 363 - protein, 9 aa, Artificial Sequence
  Linker
GSIEPDIGS

SEQ ID NO: 364 - protein, 9 aa, Artificial Sequence
  Linker
GSLEADTGS

SEQ ID NO: 365 - protein, 18 aa, Artificial Sequence
  Linker
GGSGGGGIEPDGGGSGGS

SEQ ID NO: 366 - protein, 18 aa, Artificial Sequence
  Linker
GGSGGGGIEPDVGGSGGS

SEQ ID NO: 367 - protein, 18 aa, Artificial Sequence
  Linker
GGSGGGGIEPDSGGSGGS

SEQ ID NO: 368 - protein, 18 aa, Artificial Sequence
  Linker
GGSGGGGIEPDTGGSGGS

SEQ ID NO: 369 - protein, 12 aa, Artificial Sequence
  Linker
GGGSLEPDGSGS

SEQ ID NO: 370 - protein, 18 aa, Artificial Sequence
  Linker
GPAGLGLEADGSRQARVG

SEQ ID NO: 371 - protein, 15 aa, Artificial Sequence
  Linker
GGEGGGGSGGSGGGS

SEQ ID NO: 372 - protein, 18 aa, Artificial Sequence
  Linker
GSSAGSEAGGSGQAGVGS

SEQ ID NO: 373 - protein, 18 aa, Artificial Sequence
  Linker
GGSGGGGLEAEGSGGGGS

SEQ ID NO: 374 - protein, 18 aa, Artificial Sequence
  Linker
GGSGGGGIEPDPGGSGGS

SEQ ID NO: 375 - protein, 19 aa, Artificial Sequence
  Linker
TGGSGGGGIEPDIGGSGGS

SEQ ID NO: 376 - protein, 204 aa, Artificial Sequence
  41BBL
ACPWAVSGARASPGSAASPRLREGPELSPDDPAGLLDLRQGMFAQLVAQNVLLIDGPLSWYSDPGLAGVSLTGGLSYKEDTKELVVAKAGVYYVFFQLELRRVVAGEGSGSVSLALHLQPLRSAAGAAALALTVDLPPASSEANSAFGFQGRLLHLSAGQRLGVHLHTEARARHAWQLTQGATVLGLFRVTPEIPAGLPSPRSE

SEQ ID NO: 377 - protein, 116 aa, Artificial Sequence
  41BB VH
EVQLVQSGAEVKKPGESLRISCKGSGYSFSTYWISWVRQMPGKGLEWMGKIYPGDSYTNYSPSFQGQVTISADKSISTAYLQWSSLKASDTAMYYCARGYGIFDYWGQGTLVTVSS

SEQ ID NO: 378 - protein, 108 aa, Artificial Sequence
  41BB VL
SYELTQPPSVSVSPGQTASITCSGDNIGDQYAHWYQQKPGQSPVLVIYQDKNRPSGIPERFSGSNSGNTATLTISGTQAMDEADYYCATYTGFGSLAVFGGGTKLTVL

SEQ ID NO: 379 - protein, 121 aa, Artificial Sequence [sequence omitted]

SEQ ID NO: 380 - protein, 109 aa, Artificial Sequence [sequence omitted]

SEQ ID NO: 381 - protein, 120 aa, Artificial Sequence
  41BB VH
QMQLVQSGAEVKKPGASVKVSCKASGYSFSGYYMHWVRQAPGQGLEWMGWVNPMSGGTNYAQKFQGRVTITRDTSASTAYMELSSLRSEDTAVYYCAREGMAMRLELDKWGQGTLVTVSS

SEQ ID NO: 382 - protein, 106 aa, Artificial Sequence
  41BB VL
SYELTQPPSVSVAPGKTARITCGGNNIGSKSVHWYQQKPGQAPVLVIYYDSDRPSGIPERFSGSNSGNTATLTISRVEAGDEADYYCQVWDSSSVVFGGGTQLTVL

SEQ ID NO: 383 - protein, 178 aa, Artificial Sequence
  41BB Anticalin
QDSTSDLIPAPPLSKVPLQQNFQDNQFHGKWYVVGQAGNIKLREDKDPNKMMATIYELKEDKSYNVTGVTFDDKKCTYAISTFVPGSQPGEFTLGKIKSFPGHTSSLVRVVSTNYNQHAMVFFKFVFQNREEFYITLYGRTKELTSELKENFIRFSKSLGLPENHIVFPVPIDQCIDG

SEQ ID NO: 384 - protein, 178 aa, Artificial Sequence
  41BB Anticalin
QDSTSDLIPAPPLSKVPLQQNFQDNQFHGKWYVVGQAGNIRLREDKDPIKMMATIYELKEDKSYDVTMVKFDDKKCMYDIWTFVPGSQPGEFTLGKIKSFPGHTSSLVRVVSTNYNQHAMVFFKFVFQNREEFYITLYGRTKELTSELKENFIRFSKSLGLPENHIVFPVPIDQCIDG

SEQ ID NO: 385 - protein, 178 aa, Artificial Sequence
  41BB Anticalin
QDSTSDLIPAPPLSKVPLQQNFQDNQFHGKWYVVGQAGNIRLREDKDPNKMMATIYELKEDKSYDVTAVAFDDKKCTYDIWTFVPGSQPGEFTLGKIKSFPGHTSSLVRVVSTNYNQHAMVFFKFVFQNREEFYITLYGRTKELTSELKENFIRFSKSLGLPENHIVFPVPIDQCIDG

SEQ ID NO: 386 - protein, 178 aa, Artificial Sequence
  41BB Anticalin
QDSTSDLIPAPPLSKVPLQQNFQDNQFHGKWYVVGQAGNIKLREDKDPNKMMATIYELKEDKSYDVTAVAFDDKKCTYDIWTFVPGSQPGEFTLGKIKSFPGHTSSLVRVVSTNYNQHAMVFFKFVFQNREEFYITLYGRTKELTSELKENFIRFSKSLGLPENHIVFPVPIDQCIDG

SEQ ID NO: 387 - protein, 175 aa, Artificial Sequence
  41BB Anticalin
QDSTSDLIPAPPLSKVPLQQNFQDNQFHGKWYVVGQAGNIKLREDSKMMATIYELKEDKSYDVTGVSFDDKKCTYAIMTFVPGSQPGEFTLGKIKSFPGHTSSLVRVVSTNYNQHAMVFFKFVFQNREEFYITLYGRTKELTSELKENFIRFSKSLGLPENHIVFPVPIDQCIDG

SEQ ID NO: 388 - protein, 178 aa, Artificial Sequence
  41BB Anticalin
QDSTSDLIPAPPLSKVPLQQNFQDNQFHGKWYVVGQAGNIKLREDKDPVKMMATIYELKEDKSYDVTGVTFDDKKCRYDISTFVPGSQPGEFTFGKIKSFPGHTSSLVRVVSTNYNQHAMVFFKFVFQNREEFYITLYGRTKELTSELKENFIRFSKSLGLPENHIVFPVPIDQCIDG

SEQ ID NO: 389 - protein, 178 aa, Artificial Sequence
  41BB Anticalin
QDSTSDLIPAPPLSKVPLQQNFQDNQFHGKWYVVGQAGNIRLREDKDPHKMMATIYELKEDKSYDVTGVTFDDKKCTYAISTFVPGSQPGEFTLGKIKSFPGHTSSLVRVVSTNYNQHAMVFFKFVFQNREEFYITLYGRTKELTSELKENFIRFSKSLGLPENHIVFPVPIDQCIDG

SEQ ID NO: 390 - protein, 178 aa, Artificial Sequence
  41BB Anticalin
QDSTSDLIPAPPLSKVPLQQNFQDNQFHGKWYVVGQAGNIKLREDKDPNKMMATIYELKEDKSYDVTGVTFDDKKCTYAISTLVPGSQPGEFTFGKIKSFPGHTSSLVRVVSTNYNQHAMVFFKFVFQNREEFYITLYGRTKELTSELKENFIRFSKSLGLPENHIVFPVPIDQCIDG

SEQ ID NO: 391 - protein, 178 aa, Artificial Sequence
  41BB Anticalin
QDSTSDLIPAPPLSKVPLQQNFQDNQFHGKWYVVGQAGNIRLREDKDPSKMMATIYELKEDKSYDVTAVTFDDKKCNYAISTFVPGSQPGEFTLGKIKSFPGHTSSLVRVVSTNYNQHAMVFFKFVFQNREEFYITLYGRTKELTSELKENFIRFSKSLGLPENHIVFPVPIDQCIDG

SEQ ID NO: 392 - protein, 184 aa, Homo sapiens
  71-254 of human 41BBL
REGPELSPDDPAGLLDLRQGMFAQLVAQNVLLIDGPLSWYSDPGLAGVSLTGGLSYKEDTKELVVAKAGVYYVFFQLELRRVVAGEGSGSVSLALHLQPLRSAAGAAALALTVDLPPASSEARNSAFGFQGRLLHLSAGQRLGVHLHTEARARHAWQLTQGATVLGLFRVTPEIPAGLPSPRSE

SEQ ID NO: 393 - protein, 170 aa, Homo sapiens
  85-254 of human 41BBL
LDLRQGMFAQLVAQNVLLIDGPLSWYSDPGLAGVSLTGGLSYKEDTKELVVAKAGVYYVFFQLELRRVVAGEGSGSVSLALHLQPLRSAAGAAALALTVDLPPASSEARNSAFGFQGRLLHLSAGQRLGVHLHTEARARHAWQLTQGATVLGLFRVTPEIPAGLPSPRSE

SEQ ID NO: 394 - protein, 175 aa, Homo sapiens
  80-254 of human 41BBL
DPAGLLDLRQGMFAQLVAQNVLLIDGPLSWYSDPGLAGVSLTGGLSYKEDTKELVVAKAGVYYVFFQLELRRVVAGEGSGSVSLALHLQPLRSAAGAAALALTVDLPPASSEARNSAFGFQGRLLHLSAGQRLGVHLHTEARARHAWQLTQGATVLGLFRVTPEIPAGLPSPRSE

SEQ ID NO: 395 - protein, 203 aa, Homo sapiens
  52-254 of human 4-lBBL
PWAVSGARASPGSAASPRLREGPELSPDDPAGLLDLRQGMFAQLVAQNVLLIDGPLSWYSDPGLAGVSLTGGLSYKEDTKELVVAKAGVYYVFFQLELRRVVAGEGSGSVSLALHLQPLRSAAGAAALALTVDLPPASSEARNSAFGFQGRLLHLSAGQRLGVHLHTEARARHAWQLTQGATVLGLFRVTPEIPAGLPSPRSE

SEQ ID NO: 396 - protein, 178 aa, Homo sapiens
  71-248 of human 41BBL
REGPELSPDDPAGLLDLRQGMFAQLVAQNVLLIDGPLSWYSDPGLAGVSLTGGLSYKEDTKELVVAKAGVYYVFFQLELRRVVAGEGSGSVSLALHLQPLRSAAGAAALALTVDLPPASSEARNSAFGFQGRLLHLSAGQRLGVHLHTEARARHAWQLTQGATVLGLFRVTPEIPAGL

SEQ ID NO: 397 - protein, 164 aa, Homo sapiens
  85-248 of human 41BBL
LDLRQGMFAQLVAQNVLLIDGPLSWYSDPGLAGVSLTGGLSYKEDTKELVVAKAGVYYVFFQLELRRVVAGEGSGSVSLALHLQPLRSAAGAAALALTVDLPPASSEARNSAFGFQGRLLHLSAGQRLGVHLHTEARARHAWQLTQGATVLGLFRVTPEIPAGL

SEQ ID NO: 398 - protein, 169 aa, Homo sapiens
  80-248 of human 41BBL
DPAGLLDLRQGMFAQLVAQNVLLIDGPLSWYSDPGLAGVSLTGGLSYKEDTKELVVAKAGVYYVFFQLELRRVVAGEGSGSVSLALHLQPLRSAAGAAALALTVDLPPASSEARNSAFGFQGRLLHLSAGQRLGVHLHTEARARHAWQLTQGATVLGLFRVTPEIPAGL

SEQ ID NO: 399 - protein, 197 aa, Homo sapiens
  52-248 of human 41BBL
PWAVSGARASPGSAASPRLREGPELSPDDPAGLLDLRQGMFAQLVAQNVLLIDGPLSWYSDPGLAGVSLTGGLSYKEDTKELVVAKAGVYYVFFQLELRRVVAGEGSGSVSLALHLQPLRSAAGAAALALTVDLPPASSEARNSAFGFQGRLLHLSAGQRLGVHLHTEARARHAWQLTQGATVLGLFRVTPEIPAGL

SEQ ID NO: 400 - protein, 121 aa, Artificial Sequence
  41BB sdAb
EVQLLESGGGEVQPGGSLRLSCAASGFSFSINAMGWYRQAPGKRREFVAAIESGRNTVYAESVKGRFTISRDNAKNTVYLQMSSLRAEDTAVYYCGLLKGNRVVSPSVAYWGQGTLVTVKP

SEQ ID NO: 401 - protein, 133 aa, Artificial Sequence
  OX40 ligand
QVSHRYPRIQSIKVQFTEYKKEKGFILTSQKEDEIMKVQNNSVIINCDGFYLISLKGYFSQEVNISLHYQKDEEPLFQLKKVRSVNSLMVASLTYKDKVYLNVTTDNTSLDDFHVNGGELILIHQNPGEFCVL

SEQ ID NO: 402 - protein, 133 aa, Artificial Sequence
  OX40 ligand
QVSHRYPRFQSIKVQFTEYKKEKGFILTSQKEDEIMKVQNNSVIINCDGFYLISLKGYFSQEVNISLHYQKDEEPLFQLKKVRSVNSLMVASLTYKDKVYLNVTTDNTSLDDFHVNGGELILIHQNPGEFCVL

SEQ ID NO: 403 - protein, 133 aa, Artificial Sequence; identical to SEQ ID NO: 401
  OX40 ligand

SEQ ID NO: 404 - protein, 133 aa, Artificial Sequence; identical to SEQ ID NO: 401
  OX40 Ligand

SEQ ID NO: 405 - protein, 133 aa, Artificial Sequence; identical to SEQ ID NO: 401
  OX40 ligand

SEQ ID NO: 406 - protein, 117 aa, Artificial Sequence
  OX40 VH
EVQLVQSGAEVKKPGASVKVSCKASGYTFTDSYMSWVRQAPGQGLEWIGDMYPDNGDSSYNQKFRERVTITRDTSTSTAYLELSSLRSEDTAVYYCVLAPRWYFSVWGQGTLVTVSS

SEQ ID NO: 407 - protein, 109 aa, Artificial Sequence
  OX40 VL
DIQMTQSPSSLSASVGDRVTITCRASQDISNYLNWYQQKPGKAPKLLIYYTSRLRSGVPSRFSGSGSGTDFTLTISSLQPEDFATYYCQQGHTLPPTFGQGTKVEIKRT

SEQ ID NO: 408 - protein, 121 aa, Artificial Sequence
  OX40 VH
EVQLVESGGGLVQPGGSLKLSCAASGFTFSGSAMHWVRQASGKGLEWVGRIRSKANSYATAYAASVKGRFTISRDDSKNTAYLQMNSLKTEDTAVYYCTSGIYDSSGYDYWGQGTLVTVSS

SEQ ID NO: 409 - protein, 112 aa, Artificial Sequence
  OX40 VL
DIVMTQSPLSLPVTPGEPASISCRSSQSLLHSNGYNYLDWYLQKPGQSPQLLIYLGSNRASGVPDRFSGSGSGTDFTLKISRVEAEDVGVYYCMQALQTPLTFGGGTKVEIK

SEQ ID NO: 410 - protein, 115 aa, Artificial Sequence
  OX40 sdAb
EVQLLESGGGEVQPGGSLRLSCAASGFTFSDAFMYWVRQAPGKGLEWVSSISNRGLKTAYAESVKGRFTISRDNAKNTLYLQMSSLRAEDTAVYYCSRDVDGDFRGQGTLVTVKP

SEQ ID NO: 411 - protein, 128 aa, Artificial Sequence
  GITR ligand
QLETAKEPCMAKFGPLPSKWQMASSEPPCVNKVSDWKLEILQNGLYLIYGQVAPNANYNDVAPFEVRLYKNKDMIQTLTNKSKIQNVGGTYELHVGDTIDLIFNSEHQVLKNNTYWGIILLANPQFIS

SEQ ID NO: 412 - protein, 118 aa, Artificial Sequence
  GITR VH
QVQLVESGGGVVQPGRSLRLSCAASGFTFSSYAMSWVRQAPGKGLEWVASISSGGTTYYPDSVKGRFTISRDNSKNTLYLQMNSLRAEDTAVYYCARVGGYYDSMDYWGQGTLVTVSS

SEQ ID NO: 413 - protein, 111 aa, Artificial Sequence
  GITR VL
EIVLTQSPGTLSLSPGERATLSCRASESVDNYGVSFMNWYQQKPGQAPRLLIYAASNQGSGIPDRFSGSGSGTDFTLTISRLEPEDFAVYYCQQTKEVTWTFGQGTKVEIK

SEQ ID NO: 414 - protein, 119 aa, Artificial Sequence
  GITR VH
QVTLRESGPALVKPTQTLTLTCTFSGFSLSTSGMGVGWIRQPPGKALEWLAHIWWDDDKYYQPSLKSRLTISKDTSKNQVVLTMTNMDPVDTATYYCARTRRYFPFAYWGQGTLVTVSS

SEQ ID NO: 415 - protein, 107 aa, Artificial Sequence
  GITR VL
EIVMTQSPATLSVSPGERATLSCKASQNVGTNVAWYQQKPGQAPRLLIYSASYRYSGIPARFSGSGSGTEFTLTISSLQSEDFAVYYCQQYNTDPLTFGGGTKVEIK

SEQ ID NO: 416 - protein, 119 aa, Artificial Sequence
  GITR sdAb
EVQLLESGGGEVQPGGSLRLSCAASGSVFSIDAMGWYRQAPGKQRELVAVLSGISSAKYAASAPGRFTISRDNAKNTVYLQMSSLRAEDTAVYYCYADVSTGWGRDAHGYWGQGTLVTV

SEQ ID NO: 417 - protein, 109 aa, Artificial Sequence
  anti-CD3 VL (CON)
QAVVTQEPSLTVSPGGTVTLTCGSSTGAVTTSNYANWVQQKPGQAFRGLIGGTNKRAPGVPARFSGSLLGGKAALTISGAQPEDEADYYCALWYSNHWVFGCGTKLTVL

SEQ ID NO: 418 - protein, 504 aa, Artificial Sequence
  First Polypeptide Chain of B7-H3 x CD3 Bispecific DART-A Diabody
DIQLTQSPSFLSASVGDRVTITCKASQNVDTNVAWYQQKPGKAPKALIYSASYRYSGVPSRFSGSGSGTDFTLTISSLQPEDFATYYCQQYNNYPFTFGQGTKLEIKGGGSGGGGEVQLVESGGGLVQPGGSLRLSCAASGFTFSTYAMNWVRQAPGKGLEWVGRIRSKYNNYATYYADSVKDRFTISRDDSKNSLYLQMNSLKTEDTAVYYCVRHGNFGNSYVSWFAYWGQGTLVTVSSGGCGGGEVAALEKEVAALEKEVAALEKEVAALEKGGGDKTHTCPPCPAPEAAGGPSVFLFPPKPKDTLMISRTPEVTCVVVDVSHEDPEVKFNWYVDGVEVHNAKTKPREEQYNSTYRVVSVLTVLHQDWLNGKEYKCKVSNKALPAPIEKTISKAKGQPREPQVYTLPPSREEMTKNQVSLWCLVKGFYPSDIAVEWESNGQPENNYKTTPPVLDSDGSFFLYSKLTVDKSRWQQGNVFSCSVMHEALHNHYTQKSLSLSPGK

SEQ ID NO: 419 - protein, 274 aa, Artificial Sequence
  Second Polypeptide Chain of B7-H3 x CD3 Bispecific DART-A Diabody
QAVVTQEPSLTVSPGGTVTLTCRSSTGAVTTSNYANWVQQKPGQAPRGLIGGTNKRAPWTPARFSGSLLGGKAALTITGAQAEDEADYYCALWYSNLWVFGGGTKLTVLGGGGSGGGGEVQLVESGGGLVQPGGSLRLSCAASGFTFSSFGMHWVRQAPGKGLEWVAYISSDSSAIYYADTVKGRFTISRDNAKNSLYLQMNSLRDEDTAVYYCGRGRENIYYGSRLDYWGQGTTVTVSSGGCGGGKVAALKEKVAALKEKVAALKEKVAALKE

SEQ ID NO: 420 - protein, 227 aa, Artificial Sequence
  Third Polypeptide Chain of B7-H3 x CD3 Bispecific DART-A Diabody
DKTHTCPPCPAPEAAGGPSVFLFPPKPKDTLMISRTPEVTCVVVDVSHEDPEVKFNWYVDGVEVHNAKTKPREEQYNSTYRVVSVLTVLHQDWLNGKEYKCKVSNKALPAPIEKTISKAKGQPREPQVYTLPPSREEMTKNQVSLSCAVKGFYPSDIAVEWESNGQPENNYKTTPPVLDSDGSFFLVSKLTVDKSRWQQGNVFSCSVMHEALHNRYTQKSLSLSPGK

SEQ ID NO: 421 - protein, 117 aa, Artificial Sequence
  hz18H10v1
EVQLVESGGGEVQPGGSLRLSCAASGSMTGANTMGWYRQAPGKGRDLVSLIGNYVTHYAESVKGRFTISRDNAKNTLYLQMSSLRAEDTAVYYCYLYTDNLGTSWGQGTLVTVKPGG

SEQ ID NO: 422 - protein, 117 aa, Artificial Sequence
  hz18H10v2
EVQLVESGGGEVQPGGSLRLSCAASGSMTGANTMGWYRQAPGKQRDLVSLIGNYVTHYAESVKGRFTISRDNAKNTLYLQMSSLRAEDTAVYYCYLYTDNLGTSWGQGTLVTVKPGG

SEQ ID NO: 423 - protein, 117 aa, Artificial Sequence
  hz18H10v3
EVQLVESGGGEVQPGGSLRLSCAASGSMTGANTMGWYRQAPGKQRDLVSLIGNYVTHYAESVKGRFTISRDNAKNTVYLQMSSLRAEDTAVYYCYLYTDNLGTSWGQGTLVTVKPGG

SEQ ID NO: 424 - protein, 117 aa, Artificial Sequence
  hz18H10v4
EVQLVESGGGEVQPGGSLRLSCAASGSMTGANTMGWYRQAPGKQRDLVALIGNYVTHYAESVKGRFTISRDNAKNTVYLQMSSLRAEDTAVYYCYLYTDNLGTSWGQGTLVTVKPGG

SEQ ID NO: 425 - protein, 117 aa, Artificial Sequence
  hz18H10v5
EVQLVESGGGEVQPGGSLRLSCAASGSMTGANTMGWYRQAPGKQRDLVALIGNYVTHYAESVKGRFTISRENAKNTVYLQMSSLRAEDTAVYYCYLYTDNLGTSWGQGTLVTVKPGG

SEQ ID NO: 426 - protein, 117 aa, Artificial Sequence
  hz18H10v6
EVQLVESGGGEVQPGGSLRLSCAASGSVTGANTMGWYRQAPGKQRDLVALIGNYVTHYAESVKGRFTISRDNAKNTVYLQMSSLRAEDTAVYYCYLYTDNLGTSWGQGTLVTVKPGG

SEQ ID NO: 427 - protein, 117 aa, Artificial Sequence
  hz18H10v7
EVQLVESGGGEVQPGGSLRLSCAASGSITGANTMGWYRQAPGKQRDLVALIGNYVTHYAESVKGRFTISRDNAKNTVYLQMSSLRAEDTAVYYCYLYTDNLGTSWGQGTLVTVKPGG

SEQ ID NO: 428 - protein, 117 aa, Artificial Sequence
  hz18H10v8
EVQLVESGGGEVQPGGSLRLSCAASGSVTGANTMGWYRQAPGKQRDLVSLIGNYVTHYAESVKGRFTISRDNAKNTLYLQMSSLRAEDTAVYYCYLYTDNLGTSWGQGTLVTVKPGG

SEQ ID NO: 429 - protein, 117 aa, Artificial Sequence
  hz18H10v9
EVQLVESGGGEVQPGGSLRLSCAASGSVTGANTMGWYRQAPGKQRDLVSLIGNYVTHYAESVKGRFTISRDNAKNTVYLQMSSLRAEDTAVYYCYLYTDNLGTSWGQGTLVTVKPGG

SEQ ID NO: 430 - protein, 117 aa, Artificial Sequence
  hz18H10v10
EVQLVESGGGEVQPGGSLRLSCAASGSMTGANTMGWYRQAPGKQRDLVSLIGNYVTHYAESVKGRFTISRENAKNTVYLQMSSLRAEDTAVYYCYLYTDNLGTSWGQGTLVTVKPGG

SEQ ID NO: 431 - protein, 117 aa, Artificial Sequence
  hz18H10v11
EVQLVESGGGEVQPGGSLRLSCAASGSVTGANTMGWYRQAPGKQRDLVSLIGNYVTHYAESVKGRFTISRENAKNTVYLQMSSLRAEDTAVYYCYLYTDNLGTSWGQGTLVTVKPGG

SEQ ID NO: 432 - protein, 117 aa, Artificial Sequence
  hz18H10v12
EVQLVESGGGEVQPGGSLRLSCAASGSVTGANTMGWYRQAPGKQRDLVALIGNYVTHYAESVKGRFTISRENAKNTVYLQMSSLRAEDTAVYYCYLYTDNLGTSWGQGTLVTVKPGG

SEQ ID NO: 433 - protein, 117 aa, Artificial Sequence
  hz18H10v13
EVQLVESGGGEVQPGGSLRLSCAASGSMTGANTMGWYRQAPGKQRELVALIGNYVTHYAESVKGRFTISRENAKNTVYLQMSSLRAEDTAVYYCYLYTDNLGTSWGQGTLVTVKPGG

SEQ ID NO: 434 - protein, 117 aa, Artificial Sequence
  hz18H10v14
EVQLVESGGGEVQPGGSLRLSCAASGSVTGANTMGWYRQAPGKQRDLVALIGNYVTHYAESVKGRFTISRDNAKNTLYLQMSSLRAEDTAVYYCYLYTDNLGTSWGQGTLVTVKPGG

SEQ ID NO: 435 - protein, 117 aa, Artificial Sequence
  hz18H10v15
EVQLVESGGGEVQPGGSLRLSCAASGSITGANTMGWYRQAPGKQRDLVALIGNYVTHYAESVKGRFTISRDNAKNTLYLQMSSLRAEDTAVYYCYLYTDNLGTSWGQGTLVTVKPGG

SEQ ID NO: 436 - protein, 117 aa, Artificial Sequence
  hz18H10v16
EVQLVESGGGEVQPGGSLRLSCAASGSITGANTMGWYRQAPGKQRDLVALIGNYVTHYAESVKGRFTISRENAKNTVYLQMSSLRAEDTAVYYCYLYTDNLGTSWGQGTLVTVKPGG

SEQ ID NO: 437 - protein, 117 aa, Artificial Sequence
  hz18H10v17
EVQLVESGGGEVQPGGSLRLSCAASGSITGANTMGWYRQAPGKQRDLVALIGNYVTHYAESVKGRFTISRDNAKNTVYLQMNSLRAEDTAVYYCYLYTDNLGTSWGQGTLVTVKPGG

SEQ ID NO: 438 - protein, 10 aa, Artificial Sequence
  CDRH1
GSMTGANTMG

SEQ ID NO: 439 - protein, 10 aa, Artificial Sequence
  CDRH1
GSVTGANTMG

SEQ ID NO: 440 - protein, 10 aa, Artificial Sequence
  CDRH1
GSITGANTMG

SEQ ID NO: 441 - protein, 8 aa, Artificial Sequence
  CDRH2
LIGNYVTH

SEQ ID NO: 442 - protein, 8 aa, Artificial Sequence
  CDRH3
YTDNLGTS

SEQ ID NO: 443 - protein, 115 aa, Artificial Sequence
  18H10
QVQLVQSGGGLVQPGGSLRLSCVASGSMTGANTMGWYRQAPGKQRDLVALIGNYHYADSVKGRFTISRENAKNTVILQMNSLNPEDTAVYYCYLYTDNLGTSWGQGTLVTVKPGG

SEQ ID NO: 444 - protein, 5 aa, Artificial Sequence
  Linker
PGGGG

SEQ ID NO: 445 - protein, 225 aa, Artificial Sequence
  Knob Fc
DKTHTCPPCPAPELLGGPSVFLFPPKPKDTLMISRTPEVTCVVVDVSHEDPEVKFNWYVDGVEVHNAKTKPREEQYNSTYRVVSVLTVLHQDWLNGKEYKCKVSNKALPAPIEKTISKAKGQPREPQVYTLPPCRDELTKNQVSLWCLVKGFYPSDIAVEWESNGQPENNYKTTPPVLDSDGSFFLYSKLTVDKSRWQQGNVFSCSVMHEALHNHYTQKSLSLSP

SEQ ID NO: 446 - protein, 225 aa, Artificial Sequence
  Knob Fc
DKTHTCPPCPAPELLGGPSVFLFPPKPKDTLMRSRTPEVTCVVVDVSHEDPEVKFNWYVDGVEVHNAKTKPREEQYNSTYRVVSVLTVLHQDWLNGKEYKCKVSNKALPAPIEKTISKAKGQPREPQVCTLPPSRDELTKNQVSLSCAVKGFYPSDIAVEWESNGQPENNYKTTPPVLDSDGSFFLVSKLTVDKSRWQQGNVFSCSVMHEALHNHYTQKSLSLSP

SEQ ID NO: 447 - protein, 222 aa, Artificial Sequence
  Knob Fc
DKTHTCPPCPAPGGPSVFLFPPKPKDTLMISRTPEVTCVVVDVSHEDPEVKFNWYVDGVEVHNAKTKPREEQYNSTYRVVSVLTVLHQDWLNGKEYKCKVSNKALPAPIEKTISKAKGQPREPQVYTLPPCRDELTKNQVSLWCLVKGFYPSDIAVEWESNGQPENNYKTTPPVLDSDGSFFLYSKLTVDKSRWQQGNVFSCSVMHEALHNHYTQKSLSLSP

SEQ ID NO: 448 - protein, 222 aa, Artificial Sequence
  Hole Fc
DKTHTCPPCPAPGGPSVFLFPPKPKDTLMRSRTPEVTCVVVDVSHEDPEVKFNWYVDGVEVHNAKTKPREEQYNSTYRVVSVLTVLHQDWLNGKEYKCKVSNKALPAPIEKTISKAKGQPREPQVCTLPPSRDELTKNQVSLSCAVKGFYPSDIAVEWESNGQPENNYKTTPPVLDSDGSFFLVSKLTVDKSRWQQGNVFSCSVMHEALHNHYTQKSLSLSP

SEQ ID NO: 449 - protein, 225 aa, Artificial Sequence
  Hole Fc
DKTHTCPPCPAPELLGGPSVFLFPPKPKDTLMISRTPEVTCVVVDVSHEDPEVKFNWYVDGVEVHNAKTKPREEQYNSTYRVVSVLTVLHQDWLNGKEYKCKVSNKALPAPIEKTISKAKGQPREPQVCTLPPSRDELTKNQVSLSCAVKGFYPSDIAVEWESNGQPENNYKTTPPVLDSDGSFFLVSKLTVDKSRWQQGNVFSCSVMHEALHNRYTQKSLSLSP

SEQ ID NO: 450 - protein, 222 aa, Artificial Sequence
  Hole Fc
DKTHTCPPCPAPGGPSVFLFPPKPKDTLMISRTPEVTCVVVDVSHEDPEVKFNWYVDGVEVHNAKTKPREEQYNSTYRVVSVLTVLHQDWLNGKEYKCKVSNKALPAPIEKTISKAKGQPREPQVCTLPPSRDELTKNQVSLSCAVKGFYPSDIAVEWESNGQPENNYKTTPPVLDSDGSFFLVSKLTVDKSRWQQGNVFSCSVMHEALHNRYTQKSLSLSP

SEQ ID NO: 451 - protein, 225 aa, Artificial Sequence
  Knob Fc
DKTHTCPPCPAPELLGGPSVFLFPPKPKDTLYISRTPEVTCVVVDVSHEDPEVKFNWYVDGVEVHNAKTKPREEQYNSTYRVVSVLTVLHQDWLNGKEYKCKVSNKALPAPIEKTISKAKGQPREPQVYTLPPCRDELTKNQVSLWCLVKGFYPSDIAVEWESNGQPENNYKTTPPVLDSDGSFFLYSKLTVDKSRWQQGNVFSCSVVHEALHNHYTQKSLSLSP

SEQ ID NO: 452 - protein, 222 aa, Artificial Sequence
  Knob Fc
DKTHTCPPCPAPGGPSVFLFPPKPKDTLYISRTPEVTCVVVDVSHEDPEVKFNWYVDGVEVHNAKTKPREEQYNSTYRVVSVLTVLHQDWLNGKEYKCKVSNKALPAPIEKTISKAKGQPREPQVYTLPPCRDELTKNQVSLWCLVKGFYPSDIAVEWESNGQPENNYKTTPPVLDSDGSFFLYSKLTVDKSRWQQGNVFSCSVVHEALHNHYTQKSLSLSP

SEQ ID NO: 453 - protein, 225 aa, Artificial Sequence
  Hole Fc
DKTHTCPPCPAPELLGGPSVFLFPPKPKDTLYISRTPEVTCVVVDVSHEDPEVKFNWYVDGVEVHNAKTKPREEQYNSTYRVVSVLTVLHQDWLNGKEYKCKVSNKALPAPIEKTISKAKGQPREPQVCTLPPSRDELTKNQVSLSCAVKGFYPSDIAVEWESNGQPENNYKTTPPVLDSDGSFFLVSKLTVDKSRWQQGNVFSCSVVHEALHNRYTQKSLSLSP

SEQ ID NO: 454 - protein, 222 aa, Artificial Sequence
  Hole Fc
DKTHTCPPCPAPGGPSVFLFPPKPKDTLYISRTPEVTCVVVDVSHEDPEVKFNWYVDGVEVHNAKTKPREEQYNSTYRVVSVLTVLHQDWLNGKEYKCKVSNKALPAPIEKTISKAKGQPREPQVCTLPPSRDELTKNQVSLSCAVKGFYPSDIAVEWESNGQPENNYKTTPPVLDSDGSFFLVSKLTVDKSRWQQGNVFSCSVVHEALHNRYTQKSLSLSP

SEQ ID NO: 455 - protein, 225 aa, Artificial Sequence
  B7H3-LC
EVQLVESGGGLVQPGGSLRLSCAASGFTFSSFGMHWVRQAPGKGLEWVAYISSDSSAIYYADTVKGRFTISRDNAKNSLYLQMNSLRDEDTAVYYCGRGRENIYYGSRLDYWGQGTTVTVSSASTKGPSVFPLAPSSKSTSGGTAALGCLVKDYFPEPVTVSWNSGALTSGVHTFPAVLQSSGLYSLSSVVTVPSSSLGTQTYICNVNHKPSNTKVDKKVEPKSC

SEQ ID NO: 456 - protein, 214 aa, Artificial Sequence
  B7H3-Fd
DIQLTQSPSFLSASVGDRVTITCKASQNVDTNVAWYQQKPGKAPKALIYSASYRYSGVPSRFSGSGSGTDFTLTISSLQPEDFATYYCQQYNNYPFTFGQGTKLEIKRTVAAPSVFIFPPSDEQLKSGTASVVCLLNNFYPREAKVQWKVDNALQSGNSQESVTEQDSKDSTYSLSSTLTLSKADYEKHKVYACEVTHQGLSSPVTKSFNRGEC

SEQ ID NO: 457 - protein, 226 aa, Artificial Sequence
  Fc-Het-1
DKTHTCPPCPAPPVAGPSVFLFPPKPKDTLMISRTPEVTCVVVDVKHEDPEVKFNWYVDGVEVHNAKTKPREEEYNSTYRVVSVLTVLHQDWLNGKEYKCKVSNKALPAPIEKTISKAKGQPREPQVYTLPPSREEMTKNQVSLTCDVSGFYPSDIAVEWESDGQPENNYKTTPPVLDSDGSFFLYSKLTVDKSRWEQGDVFSCSVMHEALHNHYTQKSLSLSPGK

SEQ ID NO: 458 - protein, 226 aa, Artificial Sequence
  Fc-Het-2
DKTHTCPPCPAPPVAGPSVFLFPPKPKDTLMISRTPEVTCVVVDVKHEDPEVKFNWYVDGVEVHNAKTKPREEQYNSTYRVVSVLTVLHQDWLNGKEYKCKVSNKALPAPIEKTISKAKGQPREPQVYTLPPSREQMTKNQVKLTCLVKGFYPSDIAVEWESNGQPENNYKTTPPVLDSDGSFFLYSKLTVDKSRWQQGNVFSCSVMHEALHNHYTQKSLSLSPGK

SEQ ID NO: 459 - protein, 109 aa, Artificial Sequence
  VL21
QAVVTQEPSLTVSPGGTVTLTCGSSTGAVTTSNYANWVQQKPGKSPRGLIGGTNKRAPGVPARFSGSLLGGKAALTISGAQPEDEADYYCALWYSNHWVFGCGTKLTVL

SEQ ID NO: 460 - protein, 125 aa, Artificial Sequence
  VH32
EVQLVESGGGLVQPGGSLRLSCAASGFTFSTYAMNWVRQAPGKGLEWVGRIRSKYNNYATYYADSVKGRFTISRDDSKNTLYLQMNSLRAEDTAVYYCVRHGNFGDSYVSWFAYWGQGTLVTVSS

SEQ ID NO: 461 - protein, 109 aa, Artificial Sequence
  VL20
QAVVTQEPSLTVSPGGTVTLTCGSSTGAVTTSNYANWVQQKPGKSPRGLIGGTNKRAPGVPARFSGSLLGGKAALTISGAQPEDEADYYCALWYSNHWVFGGGTKLTVL

SEQ ID NO: 462 - protein, 123 aa, Artificial Sequence
  VH34
EVQLVESGGGLVQPGGSLRLSCAASGFTFSTYAMNWVRQAPGKCLEWVARIRSKYNNYATYYADTVKGRFTISRDDAKNTLYLQMSSLRAEDTAVYYCVRHGNFGDSYVSWFAYWGQGTLVTV

SEQ ID NO: 463 - protein, 225 aa, Artificial Sequence; identical to SEQ ID NO: 445
  IgG1 Knob

SEQ ID NO: 464 - protein, 225 aa, Artificial Sequence; identical to SEQ ID NO: 446
  IgG1 Knob

SEQ ID NO: 465 - protein, 15 aa, Artificial Sequence
  Linker
GGGGSGGGGSGGGGS

SEQ ID NO: 466 - protein, 117 aa, Artificial Sequence
  hz58E05v55
EVQLVESGGGEVQPGGSLRLSCAASGFTFSSYHMSWFRQAPGKQRELVATSHHGGTTNYAGSVKGRFTISRDNAKNTVYLQMNTLRAEDTAVYYCKADHGYQGRGYWGQGTLVTVKP

SEQ ID NO: 467 - protein, 118 aa, Artificial Sequence
  hz1A5v51
EVQLVESGGGEVQPGGSLRLSCAASGFSFSSNVMMWVRQAPGKGLEWVSTIYSSGTGTFYAESVKGRFTISRDNAKNTLYLQMSSLRPEDTAVYYCATSGPVRGWGPRSQGTLVTVKP

SEQ ID NO: 468 - protein, 10 aa, Artificial Sequence
  41BB CDR1
GFSFSINAMG

SEQ ID NO: 469 - protein, 9 aa, Artificial Sequence
  41BB CDR2
AIESGRNTV

SEQ ID NO: 470 - protein, 13 aa, Artificial Sequence
  41BB CDR3
LKGNRVVSPSVAY

SEQ ID NO: 471 - protein, 10 aa, Artificial Sequence
  anti-CD3 VH CDR1
GFTFNTYAMN

SEQ ID NO: 472 - protein, 12 aa, Artificial Sequence
  anti-CD3 VH CDR2
RIRSKYNNYATY

SEQ ID NO: 473 - protein, 14 aa, Artificial Sequence
  CD3-VH7, VH33 CDR3
HGNFGDSYVSWFAY

SEQ ID NO: 474 - protein, 9 aa, Artificial Sequence
  CD3-VL2, VL21 CDR3
ALWYSNHWV

SEQ ID NO: 475 - protein, 9 aa, Artificial Sequence
  CD3-VL8 CDR3
VLWYSNRWV

SEQ ID NO: 476 - protein, 10 aa, Artificial Sequence
  CD3 VH33 CDR1
GFTFSTYAMN

SEQ ID NO: 477 - protein, 12 aa, Artificial Sequence
  CD3 VH33 CDR1
RIRSKYNNYATY

SEQ ID NO: 478 - protein, 14 aa, Artificial Sequence
  CD3 VL21 CDR1
GSSTGAVTTSNYAN

SEQ ID NO: 479 - protein, 7 aa, Artificial Sequence
  CD3 VL21 CDR2
GTNKRAP

SEQ ID NO: 480 - protein, 125 aa, Artificial Sequence
  CD3-VH33
EVQLVESGGGLVQPGGSLRLSCAASGFTFSTYAMNWVRQAPGKCLEWVGRIRSKYNNYATYYADSVKGRFTISRDDSKNTLYLQMNSLRAEDTAVYYCVRHGNFGDSYVSWFAYWGQGTLVTVSS

SEQ ID NO: 481 - protein, 121 aa, Artificial Sequence
  41BB sdAb
EVQLVESGGGEVQPGGSLRLSCAASGFSFSINAMGWYRQAPGKRREFVAAIESGRNTVYAESVKGRFTISRDNAKNTVYLQMSSLRAEDTAVYYCGLLKGNRVVSPSVAYWGQGTLVTVKP

SEQ ID NO: 482 - protein, 5 aa, Artificial Sequence
  Linker
IEPDP

SEQ ID NO: 483 - protein, 14 aa, Artificial Sequence
  CDRH3
RWGSPDYYHDDVDY

SEQ ID NO: 484 - protein, 14 aa, Artificial Sequence
  CDRH3
GEPIRVGEKSGYDY

SEQ ID NO: 485 - protein, 15 aa, Artificial Sequence
  CDRH3
GPRDYFSDLEVDFGS

SEQ ID NO: 486 - protein, 14 aa, Artificial Sequence
  CDRH3
GLPIRVGVPGGYDY

SEQ ID NO: 487 - protein, 15 aa, Artificial Sequence
  CDRH3
ASFAYLSTYTHHYDY

SEQ ID NO: 488 - protein, 14 aa, Artificial Sequence
  CDRH3
SRSAISRKATDFGS

SEQ ID NO: 489 - protein, 118 aa, Artificial Sequence
  hz1A5v52
EVQLVESGGGEVQPGGSLRLSCAASGFSFSSNVMMWVRQAPGKGLEWVSTIYSSGTGTYYAESVKGRFTISRDNAKNTLYLQMSSLRPEDTAVYYCATSGPVRGWGPRSQGTLVTVKP

SEQ ID NO: 490 - protein, 118 aa, Artificial Sequence
  hz1A5v5 3
EVQLVESGGGEVQPGGSLRLSCAASGFSFGSNVMMWVRQAPGKGLEWVSTIYSSGTGTFYAESVKGRFTISRDNAKNTLYLQMSSLRPEDTAVYYCATSGPVRGWGPRSQGTLVTVKP

SEQ ID NO: 491 - protein, 33 aa, Artificial Sequence
  Linker
  MISC_FEATURE (4)..(4): Xaa is absent or Gly
  MISC_FEATURE (5)..(5): Xaa is absent, or if Xaa at (4) is Gly, Xaa is Gly
  MISC_FEATURE (6)..(6): Xaa is absent, or if Xaa at (4) is Gly, Xaa is Ser
  MISC_FEATURE (7)..(7): Xaa is absent or Gly
  MISC_FEATURE (8)..(8): Xaa is absent, or if Xaa at (7) is Gly, Xaa is Gly
  MISC_FEATURE (9)..(9): Xaa is absent, or if Xaa at (7) is Gly, Xaa is Ser
  MISC_FEATURE (10)..(10): Xaa is absent or Gly
  MISC_FEATURE (11)..(11): Xaa is absent, or if Xaa at (10) is Gly, Xaa is Gly
  MISC_FEATURE (12)..(12): Xaa is absent, or if Xaa at (10) is Gly, Xaa is Ser
  MISC_FEATURE (13)..(13): Xaa is absent or Gly
  MISC_FEATURE (14)..(14): Xaa is absent, or if Xaa at (13) is Gly, Xaa is Gly
  MISC_FEATURE (15)..(15): Xaa is absent, or if Xaa at (13) is Gly, Xaa is Ser
  MISC_FEATURE (16)..(16): Xaa is absent or Gly
  MISC_FEATURE (17)..(17): Xaa is absent, or if Xaa at (16) is Gly, Xaa is Gly
  MISC_FEATURE (18)..(18): Xaa is absent, or if Xaa at (16) is Gly, Xaa is Ser
  MISC_FEATURE (19)..(19): Xaa is absent or Gly
  MISC_FEATURE (20)..(20): Xaa is absent, or if Xaa at (19) is Gly, Xaa is Gly
  MISC_FEATURE (21)..(21): Xaa is absent, or if Xaa at (19) is Gly, Xaa is Ser
  MISC_FEATURE (22)..(22): Xaa is absent or Gly
  MISC_FEATURE (23)..(23): Xaa is absent, or if Xaa at (22) is Gly, Xaa is Gly
  MISC_FEATURE (24)..(24): Xaa is absent, or if Xaa at (22) is Gly, Xaa is Ser
  MISC_FEATURE (25)..(25): Xaa is absent or Gly
  MISC_FEATURE (26)..(26): Xaa is absent, or if Xaa at (25) is Gly, Xaa is Gly
  MISC_FEATURE (27)..(27): Xaa is absent, or if Xaa at (25) is Gly, Xaa is Ser
  MISC_FEATURE (28)..(28): Xaa is absent or Gly
  MISC_FEATURE (29)..(29): Xaa is absent, or if Xaa at (28) is Gly, Xaa is Gly
  MISC_FEATURE (30)..(30): Xaa is absent, or if Xaa at (28) is Gly, Xaa is Ser
  MISC_FEATURE (31)..(31): Xaa is absent or Gly
  MISC_FEATURE (32)..(32): Xaa is absent, or if Xaa at (31) is Gly, Xaa is Gly
  MISC_FEATURE (33)..(33): Xaa is absent, or if Xaa at (31) is Gly, Xaa is Ser
GGSXXXXXXXXXXXXXXXXXXXXXXXXXXXXXX

SEQ ID NO: 492 - protein, 118 aa, Artificial Sequence
  hz1A5v1
EVQLVESGGGEVQPGGSLRLSCAASGFSFGSNVMMWVRQAPGKGPEWVSTIYSSGTGTFYAESVKGRFTISRDNAKNTLYLQMSSLRAEDTAVYYCATSGPVRGWGPRSQGTLVTVKP

SEQ ID NO: 493 - protein, 118 aa, Artificial Sequence
  hz1A5v2
EVQLVESGGGEVQPGGSLRLSCAASGFSFGSNVMMWVRQAPGKGPEWVSTIYSSGTGTFYAESVKGRFTISRNNAKNTLYLQMSSLRAEDTAVYYCATSGPVRGWGPRSQGTLVTVKP

SEQ ID NO: 494 - protein, 118 aa, Artificial Sequence
  hz1A5v3
EVQLVESGGGEVQPGGSLRLSCAASGFSFGSNVMMWVRQAPGKGPEWVSTIYSSGTGTFYAESVKGRFTISRNNAKNTLYLQMSSLRAEDTAVYYCATSGPVRGWGPRGQGTLVTVKP

SEQ ID NO: 495 - protein, 118 aa, Artificial Sequence
  hz1A5v7
EVQLVESGGGEVQPGGSLRLSCAASGFSFGSNVMMWVRQAPGKGPEWVSTIYSSGTGTFYAESVKGRFTISRNNAKNTLYLQMSSLKPDDTAVYYCATSGPVRGWGPRSQGTLVTVKP

SEQ ID NO: 496 - protein, 118 aa, Artificial Sequence
  hz1A5v8
EVQLVESGGGLVQAGDSLRLSCAASGFSFGSNVMMWVRQAPGKGPEWVSTIYSSGTGTFYAESVKGRFTISRNNAKNTLYLQMSSLRAEDTAVYYCATSGPVRGWGPRSQGTLVTVKP

SEQ ID NO: 497 - protein, 118 aa, Artificial Sequence
  hz1A5v9
EVQLVESGGGEVQPGGSLRLSCAASGFSFGSNVMMWVRQAPGKGPEWVSTIYSRGTGTFYAESVKGRFTISRNNAKNTLYLQMSSLRAEDTAVYYCATSGPVRGWGPRSQGTLVTVKP

SEQ ID NO: 498 - protein, 125 aa, Artificial Sequence
  hz57B04v3
EVQLVESGGGEVQPGGSLRLSCAASERTFSTYTMGWFRQAPGKEREFVSVVNWSGGSKYYAESVKGRFTISRDNAKNTVYLQMNSLRAEDTAVYYCAAGGAYSGPYYDTRQYTYWGQGTLVTVKP

SEQ ID NO: 499 - protein, 125 aa, Artificial Sequence
  hz57B04v4
EVQLVESGGGEVQPGGSLRLSCAASERTFSTYTMGWFRQAPGKEREFVAVVNWSGGSKYYAESVKGRFTISRDNAKNTVYLQMNSLRAEDTAVYYCAAGGAYSGPYYDTRQYTYWGQGTLVTVKP

SEQ ID NO: 500 - protein, 125 aa, Artificial Sequence
  hz57B04v8
EVQLVESGGGEVQPGGSLRLSCAPSERTFSTYTMGWFRQAPGKEREFVAVVNWSGGSKYYAESVKGRFTISRDNAKNTVYLQMNSLRAEDTAVYYCAAGGAYSGPYYDTRQYTYWGQGTLVTVKP

SEQ ID NO: 501 - protein, 125 aa, Artificial Sequence
  hz57B04v9
EVQLVESGGGEVQPGGSLRLSCAASERTFSTYTMGWFRQAPGKEREFVAVVNWSGGSKYYAESVKGRFTISRDNAKNTVYLHMNSLRAEDTAVYYCAAGGAYSGPYYDTRQYTYWGQGTLVTVKP

SEQ ID NO: 502 - protein, 125 aa, Artificial Sequence
  hz57B04v23
EVQLVESGGGEVQPGGSLRLSCAPSERTFSTYTMGWFRQAPGKEREFVAVVNWSGGSKYYAESVKGRFTISRDNAKNTVYLQMSSLRAEDTAVYYCAAGGAYSGPYYDTRQYTYWGQGTLVTVKP

SEQ ID NO: 503 - protein, 125 aa, Artificial Sequence
  hz57B04v24
EVQLVESGGGEVQPGGSLRLSCAPSERTFSTYTMGWFRQAPGKEREFVAVVNWGGGSKYYAESVKGRFTISRDNAKNTVYLQMSSLRAEDTAVYYCAAGGAYSGPYYDTRQYTYWGQGTLVTVKP

SEQ ID NO: 504 - protein, 117 aa, Artificial Sequence
  hz58E05v1
EVQLVESGGGEVQPGGSLRLSCAASGSTFSMYHMSWFRQAPGKGREPVSTSHHGGTTNYAESVKGRFTISRDNAKNTLYLQMNSLRAEDTAVYYCKADHGYNGRGYWGQGTLVTVKP

SEQ ID NO: 505 - protein, 117 aa, Artificial Sequence
  hz58E05v2
EVQLVESGGGEVQPGGSLRLSCAASGSTFSMYHMSWFRQAPGKQREPVSTSHHGGTTNYAESVKGRFTISRDNAKNTLYLQMNSLRAEDTAVYYCKADHGYNGRGYWGQGTLVTVKP

SEQ ID NO: 506 - protein, 117 aa, Artificial Sequence
  hz58E05v3
EVQLVESGGGEVQPGGSLRLSCAASGSTFSMYHMSWFRQAPGKQREPVSTSHHGGTTNYAESVKGRFTISRDNAKNTVYLQMNSLRAEDTAVYYCKADHGYNGRGYWGQGTLVTVKP

SEQ ID NO: 507 - protein, 117 aa, Artificial Sequence
  hz58E05v4
EVQLVESGGGEVQPGGSLRLSCAASGSTFSMYHMSWFRQAPGKQREPVATSHHGGTTNYAESVKGRFTISRDNAKNTVYLQMNSLRAEDTAVYYCKADHGYNGRGYWGQGTLVTVKP

SEQ ID NO: 508 - protein, 117 aa, Artificial Sequence
  hz58E05v5
EVQLVESGGGEVQPGGSLRLSCAASGSTFSMYHMSWFRQAPGKQREPVATSHHGGTTNYAESVKGRFTISRDNAKNTVYLQMNSLRAEDTAVYYCKADHGYQGRGYWGQGTLVTVKP

SEQ ID NO: 509 - protein, 117 aa, Artificial Sequence
  hz58E05v6
EVQLVESGGGEVQPGGSLRLSCAASGSTFSMYHMSWFRQAPGKQREPVATSHHGGTTNYAESVKGRFTISRDNAKNTVYLQMNSLRAEDTAVYYCKADHGYNARGYWGQGTLVTVKP

SEQ ID NO: 510 - protein, 117 aa, Artificial Sequence
  hz58E05v7
EVQLVESGGGEVQPGGSLRLSCAASGSTFSMYHMSWFRQAPGKQREPVATSHHGGTTNYAESVKGRFTISRDNAKNTVYLQMNSLRAEDTAVYYCKADHGYNTRGYWGQGTLVTVKP

SEQ ID NO: 511 - protein, 117 aa, Artificial Sequence
  hz58E05v8
EVQLVESGGGEVQPGGSLRLSCAASGSTFSMYHMSWFRQAPGKQREPVATSHHGGTTNYAGSVKGRFTISRDNAKNTVYLQMNSLRAEDTAVYYCKADHGYNGRGYWGQGTLVTVKP

SEQ ID NO: 512 - protein, 117 aa, Artificial Sequence
  hz58E05v9
EVQLVESGGGEVQPGGSLRLSCAASGSTFSMYHMSWFRQAPGKQREPVATSHHGGTTNYAESVKGRFTISRDNAKNTLYLQMNSLRAEDTAVYYCKADHGYQGRGYWGQGTLVTVKP

SEQ ID NO: 513 - protein, 117 aa, Artificial Sequence
  hz58E05v10
EVQLVESGGGEVQPGGSLRLSCAASGSTFSMYHMSWFRQAPGKQREPVATSHHGGTTNYAESVKGRFTISRDNAKNTLYLQMNSLRAEDTAVYYCKADHGYNARGYWGQGTLVTVKP

SEQ ID NO: 514 - protein, 117 aa, Artificial Sequence
  hz58E05v11
EVQLVESGGGEVQPGGSLRLSCAASGSTFSMYHMSWFRQAPGKQREPVATSHHGGTTNYAESVKGRFTISRDNAKNTLYLQMNSLRAEDTAVYYCKADHGYNTRGYWGQGTLVTVKP

SEQ ID NO: 515 - protein, 123 aa, Artificial Sequence
  h57B06v5
EVQLVESGGGEVQPGGSLRLSCAASGGTFSSYAMGWFRQAPGKEREFVAAISSEGGSTYYADNMEGRFTISRDNAKNTVYLQMSSLRAEDTAVYYCAVKGVGWPQEQASYDYWGQGTLVTVKP

SEQ ID NO: 516 - protein, 123 aa, Artificial Sequence
  h57B06v6
EVQLVESGGGEVQPGGSLRLSCAASGGTFSSYAMGWFRQAPGKEREFVAAISSEGGSTYYAESMEGRFTISRDNAKNTVYLQMSSLRAEDTAVYYCAVKGVGWPQEQASYDYWGQGTLVTVKP

SEQ ID NO: 517 - protein, 116 aa, Artificial Sequence
  h57B06v7
QVQLVQDGDSLRLSCAASGGTFSSYAMGWFRQAPGKEREFVAAISSEGGSTYYADNMEGRFTISRDNAKNTVYLQMSSLRAEDTAVYYCAVKGVGWPQEQASYDYWGQGTLVTVKP

SEQ ID NO: 518 - protein, 123 aa, Artificial Sequence
  h57B06v8
EVQLVESGGGEVQPGGSLRLSCAASGGTFSSYAMGWFRQAPGQEREFVAAISSEGGSTYYAESVKGRFTISRDNAKNTVYLQMSSLRAEDTAVYYCAVKGVGWPQEQASYDYWGQGTLVTVKP

SEQ ID NO: 519 - protein, 113 aa, Artificial Sequence
  18H10
QVQLVQSGGGLVQPGGSLRLSCVASGSMTGANTMGWYRQAPGKQRDLVALIGNYHYADSVKGRFTISRENAKNTVILQMNSLNPEDTAVYYCYLYTDNLGTSWGQGTLVTVKP

SEQ ID NO: 520 - protein, 115 aa, Artificial Sequence
  hz18H10v1
EVQLVESGGGEVQPGGSLRLSCAASGSMTGANTMGWYRQAPGKGRDLVSLIGNYVTHYAESVKGRFTISRDNAKNTLYLQMSSLRAEDTAVYYCYLYTDNLGTSWGQGTLVTVKP

SEQ ID NO: 521 - protein, 115 aa, Artificial Sequence
  hz18H10v2
EVQLVESGGGEVQPGGSLRLSCAASGSMTGANTMGWYRQAPGKQRDLVSLIGNYVTHYAESVKGRFTISRDNAKNTLYLQMSSLRAEDTAVYYCYLYTDNLGTSWGQGTLVTVKP

SEQ ID NO: 522 - protein, 115 aa, Artificial Sequence
  hz18H10v3
EVQLVESGGGEVQPGGSLRLSCAASGSMTGANTMGWYRQAPGKQRDLVSLIGNYVTHYAESVKGRFTISRDNAKNTVYLQMSSLRAEDTAVYYCYLYTDNLGTSWGQGTLVTVKP

SEQ ID NO: 523 - protein, 115 aa, Artificial Sequence
  hz18H10v4
EVQLVESGGGEVQPGGSLRLSCAASGSMTGANTMGWYRQAPGKQRDLVALIGNYVTHYAESVKGRFTISRDNAKNTVYLQMSSLRAEDTAVYYCYLYTDNLGTSWGQGTLVTVKP

SEQ ID NO: 524 - protein, 115 aa, Artificial Sequence
  hz18H10v5
EVQLVESGGGEVQPGGSLRLSCAASGSMTGANTMGWYRQAPGKQRDLVALIGNYVTHYAESVKGRFTISRENAKNTVYLQMSSLRAEDTAVYYCYLYTDNLGTSWGQGTLVTVKP

SEQ ID NO: 525 - protein, 115 aa, Artificial Sequence
  hz18H10v6
EVQLVESGGGEVQPGGSLRLSCAASGSVTGANTMGWYRQAPGKQRDLVALIGNYVTHYAESVKGRFTISRDNAKNTVYLQMSSLRAEDTAVYYCYLYTDNLGTSWGQGTLVTVKP

SEQ ID NO: 526 - protein, 115 aa, Artificial Sequence
  hz18H10v7
EVQLVESGGGEVQPGGSLRLSCAASGSITGANTMGWYRQAPGKQRDLVALIGNYVTHYAESVKGRFTISRDNAKNTVYLQMSSLRAEDTAVYYCYLYTDNLGTSWGQGTLVTVKP

SEQ ID NO: 527 - protein, 115 aa, Artificial Sequence
  hz18H10v8
EVQLVESGGGEVQPGGSLRLSCAASGSVTGANTMGWYRQAPGKQRDLVSLIGNYVTHYAESVKGRFTISRDNAKNTLYLQMSSLRAEDTAVYYCYLYTDNLGTSWGQGTLVTVKP

SEQ ID NO: 528 - protein, 115 aa, Artificial Sequence
  hz18H10v9
EVQLVESGGGEVQPGGSLRLSCAASGSVTGANTMGWYRQAPGKQRDLVSLIGNYVTHYAESVKGRFTISRDNAKNTVYLQMSSLRAEDTAVYYCYLYTDNLGTSWGQGTLVTVKP

SEQ ID NO: 529 - protein, 115 aa, Artificial Sequence
  hz18H10v10
EVQLVESGGGEVQPGGSLRLSCAASGSMTGANTMGWYRQAPGKQRDLVSLIGNYVTHYAESVKGRFTISRENAKNTVYLQMSSLRAEDTAVYYCYLYTDNLGTSWGQGTLVTVKP

SEQ ID NO: 530 - protein, 115 aa, Artificial Sequence
  hz18H10v11
EVQLVESGGGEVQPGGSLRLSCAASGSVTGANTMGWYRQAPGKQRDLVSLIGNYVTHYAESVKGRFTISRENAKNTVYLQMSSLRAEDTAVYYCYLYTDNLGTSWGQGTLVTVKP

SEQ ID NO: 531 - protein, 115 aa, Artificial Sequence
  hz18H10v12
EVQLVESGGGEVQPGGSLRLSCAASGSVTGANTMGWYRQAPGKQRDLVALIGNYVTHYAESVKGRFTISRENAKNTVYLQMSSLRAEDTAVYYCYLYTDNLGTSWGQGTLVTVKP

SEQ ID NO: 532 - protein, 115 aa, Artificial Sequence
  hz18H10v13
EVQLVESGGGEVQPGGSLRLSCAASGSMTGANTMGWYRQAPGKQRELVALIGNYVTHYAESVKGRFTISRENAKNTVYLQMSSLRAEDTAVYYCYLYTDNLGTSWGQGTLVTVKP

SEQ ID NO: 533 - protein, 115 aa, Artificial Sequence
  hz18H10v14
EVQLVESGGGEVQPGGSLRLSCAASGSVTGANTMGWYRQAPGKQRDLVALIGNYVTHYAESVKGRFTISRDNAKNTLYLQMSSLRAEDTAVYYCYLYTDNLGTSWGQGTLVTVKP

SEQ ID NO: 534 - protein, 115 aa, Artificial Sequence
  hz18H10v15
EVQLVESGGGEVQPGGSLRLSCAASGSITGANTMGWYRQAPGKQRDLVALIGNYVTHYAESVKGRFTISRDNAKNTLYLQMSSLRAEDTAVYYCYLYTDNLGTSWGQGTLVTVKP

SEQ ID NO: 535 - protein, 115 aa, Artificial Sequence
  hz18H10v16
EVQLVESGGGEVQPGGSLRLSCAASGSITGANTMGWYRQAPGKQRDLVALIGNYVTHYAESVKGRFTISRENAKNTVYLQMSSLRAEDTAVYYCYLYTDNLGTSWGQGTLVTVKP

SEQ ID NO: 536 - protein, 115 aa, Artificial Sequence
  hz18H10v17
EVQLVESGGGEVQPGGSLRLSCAASGSITGANTMGWYRQAPGKQRDLVALIGNYVTHYAESVKGRFTISRDNAKNTVYLQMNSLRAEDTAVYYCYLYTDNLGTSWGQGTLVTVKP

SEQ ID NO: 537 - protein, 122 aa, Artificial Sequence
  Anti-CD3 VH 312557
EVQLVESGGGLVQPGRSLRLSCAASGFTFDDYAMHWVRQAPGKGLEWVSGISWNSGSIGYADSVKGFTISRDNAKNSLYLQMNSLRAEDTALYYCAKDSRGYGDYRLGGAYWGQGTLVTVSS

SEQ ID NO: 538 - protein, 122 aa, Artificial Sequence
  Anti-CD3 VH 312557 G44C
EVQLVESGGGLVQPGRSLRLSCAASGFTFDDYAMHWVRQAPGKCLEWVSGISWNSGSIGYADSVKGFTISRDNAKNSLYLQMNSLRAEDTALYYCAKDSRGYGDYRLGGAYWGQGTLVTVSS

SEQ ID NO: 539 - protein, 107 aa, Artificial Sequence
  Anti-CD3 VL 312557
EIVMTQSPATLSVSPGERATLSCRASQSVSSNLAWYQQKPGQAPRLLIYGASTRATGIPARFSGSGSGTEFTLTISSLQSEDFAVYYCQQYNNWPWTFGQGTKVEIK

SEQ ID NO: 540 - protein, 107 aa, Artificial Sequence
  Anti-CD3 VL 312557 Q100C
EIVMTQSPATLSVSPGERATLSCRASQSVSSNLAWYQQKPGQAPRLLIYGASTRATGIPARFSGSGSGTEFTLTISSLQSEDFAVYYCQQYNNWPWTFGCGTKVEIK

SEQ ID NO: 541 - protein, 124 aa, Artificial Sequence
  CD3-VH-G
EVQLVESGGGLVQPGRSLRLSCVASGFTFDDYSMHWVRQAPGKGLEWVSGISWNSGSKDYADSVKGRFTISRDNAKNSLYLQMNSLRAEDTALYYCAKYGSGYGKFYHYGLDVWGQGTTVTVSS

SEQ ID NO: 542 - protein, 124 aa, Artificial Sequence
  CD3-VH-G
EVQLVESGGGLVQPGRSLRLSCVASGFTFDDYSMHWVRQAPGKCLEWVSGISWNSGSKDYADSVKGRFTISRDNAKNSLYLQMNSLRAEDTALYYCAKYGSGYGKFYHYGLDVWGQGTTVTVSS

SEQ ID NO: 543 - protein, 108 aa, Artificial Sequence
  VK1-39Jk5
DIQMTQSPSSLSASVGDRVTITCRASQSISSYLNWYQQKPGKAPKLLIYAASSLQSGVPSRFSGSGSGTDFTLTISSLQPEDFATYYCQQSYSTPPITFGQGTRLEIK

SEQ ID NO: 544 - protein, 108 aa, Artificial Sequence
  VK1-39Jk5 Q100C
DIQMTQSPSSLSASVGDRVTITCRASQSISSYLNWYQQKPGKAPKLLIYAASSLQSGVPSRFSGSGSGTDFTLTISSLQPEDFATYYCQQSYSTPPITFGCGTRLEIK

SEQ ID NO: 545 - protein, 100 aa, Artificial Sequence
  Linker
  MISC_FEATURE (11)..(11): Xaa is absent or Ala
  MISC_FEATURE (12)..(12): Xaa is absent, or if Xaa at (11) is Ala, Xaa is Asp
  MISC_FEATURE (13)..(13): Xaa is absent, or if Xaa at (11) is Ala, Xaa is Ala
  MISC_FEATURE (14)..(14): Xaa is absent, or if Xaa at (11) is Ala, Xaa is Ala
  MISC_FEATURE (15)..(15): Xaa is absent, or if Xaa at (11) is Ala, Xaa is Pro
  MISC_FEATURE (16)..(16): Xaa is absent or Ala
  MISC_FEATURE (17)..(17): Xaa is absent, or if Xaa at (16) is Ala, Xaa is Asp
  MISC_FEATURE (18)..(18): Xaa is absent, or if Xaa at (16) is Ala, Xaa is Ala
  MISC_FEATURE (19)..(19): Xaa is absent, or if Xaa at (16) is Ala, Xaa is Ala
  MISC_FEATURE (20)..(20): Xaa is absent, or if Xaa at (16) is Ala, Xaa is Pro
  MISC_FEATURE (21)..(21): Xaa is absent or Ala
  MISC_FEATURE (22)..(22): Xaa is absent, or if Xaa at (21) is Ala, Xaa is Asp
  MISC_FEATURE (23)..(23): Xaa is absent, or if Xaa at (21) is Ala, Xaa is Ala
  MISC_FEATURE (24)..(24): Xaa is absent, or if Xaa at (21) is Ala, Xaa is Ala
  MISC_FEATURE (25)..(25): Xaa is absent, or if Xaa at (21) is Ala, Xaa is Pro
  MISC_FEATURE (26)..(26): Xaa is absent or Ala
  MISC_FEATURE (27)..(27): Xaa is absent, or if Xaa at (26) is Ala, Xaa is Asp
  MISC_FEATURE (28)..(28): Xaa is absent, or if Xaa at (26) is Ala, Xaa is Ala
  MISC_FEATURE (29)..(29): Xaa is absent, or if Xaa at (26) is Ala, Xaa is Ala
  MISC_FEATURE (30)..(30): Xaa is absent, or if Xaa at (26) is Ala, Xaa is Pro
  MISC_FEATURE (31)..(31): Xaa is absent or Ala
  MISC_FEATURE (32)..(32): Xaa is absent, or if Xaa at (31) is Ala, Xaa is Asp
  MISC_FEATURE (33)..(33): Xaa is absent, or if Xaa at (31) is Ala, Xaa is Ala
  MISC_FEATURE (34)..(34): Xaa is absent, or if Xaa at (31) is Ala, Xaa is Ala
  MISC_FEATURE (35)..(35): Xaa is absent, or if Xaa at (31) is Ala, Xaa is Pro
  MISC_FEATURE (36)..(36): Xaa is absent or Ala
  MISC_FEATURE (37)..(37): Xaa is absent, or if Xaa at (36) is Ala, Xaa is Asp
  MISC_FEATURE (38)..(38): Xaa is absent, or if Xaa at (36) is Ala, Xaa is Ala
  MISC_FEATURE (39)..(39): Xaa is absent, or if Xaa at (36) is Ala, Xaa is Ala
  MISC_FEATURE (40)..(40): Xaa is absent, or if Xaa at (36) is Ala, Xaa is Pro
  MISC_FEATURE (41)..(41): Xaa is absent or Ala
  MISC_FEATURE (42)..(42): Xaa is absent, or if Xaa at (41) is Ala, Xaa is Asp
  MISC_FEATURE (43)..(43): Xaa is absent, or if Xaa at (41) is Ala, Xaa is Ala
  MISC_FEATURE (44)..(44): Xaa is absent, or if Xaa at (41) is Ala, Xaa is Ala
  MISC_FEATURE (45)..(45): Xaa is absent, or if Xaa at (41) is Ala, Xaa is Pro
  MISC_FEATURE (46)..(46): Xaa is absent or Ala
  MISC_FEATURE (47)..(47): Xaa is absent, or if Xaa at (46) is Ala, Xaa is Asp
  MISC_FEATURE (48)..(48): Xaa is absent, or if Xaa at (46) is Ala, Xaa is Ala
  MISC_FEATURE (49)..(49): Xaa is absent, or if Xaa at (46) is Ala, Xaa is Ala
  MISC_FEATURE (50)..(50): Xaa is absent, or if Xaa at (46) is Ala, Xaa is Pro
  MISC_FEATURE (51)..(51): Xaa is absent or Ala
  MISC_FEATURE (52)..(52): Xaa is absent, or if Xaa at (51) is Ala, Xaa is Asp
  MISC_FEATURE (53)..(53): Xaa is absent, or if Xaa at (51) is Ala, Xaa is Ala
  MISC_FEATURE (54)..(54): Xaa is absent, or if Xaa at (51) is Ala, Xaa is Ala
  MISC_FEATURE (55)..(55): Xaa is absent, or if Xaa at (51) is Ala, Xaa is Pro
  MISC_FEATURE (56)..(56): Xaa is absent or Ala
  MISC_FEATURE (57)..(57): Xaa is absent, or if Xaa at (56) is Ala, Xaa is Asp
  MISC_FEATURE (58)..(58): Xaa is absent, or if Xaa at (56) is Ala, Xaa is Ala
  MISC_FEATURE (59)..(59): Xaa is absent, or if Xaa at (56) is Ala, Xaa is Ala
  MISC_FEATURE (60)..(60): Xaa is absent, or if Xaa at (56) is Ala, Xaa is Pro
  MISC_FEATURE (61)..(61): Xaa is absent or Ala
  MISC_FEATURE (62)..(62): Xaa is absent, or if Xaa at (61) is Ala, Xaa is Asp
  MISC_FEATURE (63)..(63): Xaa is absent, or if Xaa at (61) is Ala, Xaa is Ala
  MISC_FEATURE (64)..(64): Xaa is absent, or if Xaa at (61) is Ala, Xaa is Ala
  MISC_FEATURE (65)..(65): Xaa is absent, or if Xaa at (61) is Ala, Xaa is Pro
  MISC_FEATURE (66)..(66): Xaa is absent or Ala
  MISC_FEATURE (67)..(67): Xaa is absent, or if Xaa at (66) is Ala, Xaa is Asp
  MISC_FEATURE (68)..(68): Xaa is absent, or if Xaa at (66) is Ala, Xaa is Ala
  MISC_FEATURE (69)..(69): Xaa is absent, or if Xaa at (66) is Ala, Xaa is Ala
  MISC_FEATURE (70)..(70): Xaa is absent, or if Xaa at (66) is Ala, Xaa is Pro
  MISC_FEATURE (71)..(71): Xaa is absent or Ala
  MISC_FEATURE (72)..(72): Xaa is absent, or if Xaa at (71) is Ala, Xaa is Asp
  MISC_FEATURE (73)..(73): Xaa is absent, or if Xaa at (71) is Ala, Xaa is Ala
  MISC_FEATURE (74)..(74): Xaa is absent, or if Xaa at (71) is Ala, Xaa is Ala
  MISC_FEATURE (75)..(75): Xaa is absent, or if Xaa at (71) is Ala, Xaa is Pro
  MISC_FEATURE (76)..(76): Xaa is absent or Ala
  MISC_FEATURE (77)..(77): Xaa is absent, or if Xaa at (76) is Ala, Xaa is Asp
  MISC_FEATURE (78)..(78): Xaa is absent, or if Xaa at (76) is Ala, Xaa is Ala
  MISC_FEATURE (79)..(79): Xaa is absent, or if Xaa at (76) is Ala, Xaa is Ala
  MISC_FEATURE (80)..(80): Xaa is absent, or if Xaa at (76) is Ala, Xaa is Pro
  MISC_FEATURE (81)..(81): Xaa is absent or Ala
  MISC_FEATURE (82)..(82): Xaa is absent, or if Xaa at (81) is Ala, Xaa is Asp
  MISC_FEATURE (83)..(83): Xaa is absent, or if Xaa at (81) is Ala, Xaa is Ala
  MISC_FEATURE (84)..(84): Xaa is absent, or if Xaa at (81) is Ala, Xaa is Ala
  MISC_FEATURE (85)..(85): Xaa is absent, or if Xaa at (81) is Ala, Xaa is Pro
  MISC_FEATURE (86)..(86): Xaa is absent or Ala
  MISC_FEATURE (87)..(87): Xaa is absent, or if Xaa at (86) is Ala, Xaa is Asp
  MISC_FEATURE (88)..(88): Xaa is absent, or if Xaa at (86) is Ala, Xaa is Ala
  MISC_FEATURE (89)..(89): Xaa is absent, or if Xaa at (86) is Ala, Xaa is Ala
  MISC_FEATURE (90)..(90): Xaa is absent, or if Xaa at (86) is Ala, Xaa is Pro
  MISC_FEATURE (91)..(91): Xaa is absent or Ala
  MISC_FEATURE (92)..(92): Xaa is absent, or if Xaa at (91) is Ala, Xaa is Asp
  MISC_FEATURE (93)..(93): Xaa is absent, or if Xaa at (91) is Ala, Xaa is Ala
  MISC_FEATURE (94)..(94): Xaa is absent, or if Xaa at (91) is Ala, Xaa is Ala
  MISC_FEATURE (95)..(95): Xaa is absent, or if Xaa at (91) is Ala, Xaa is Pro
  MISC_FEATURE (96)..(96): Xaa is absent or Ala
  MISC_FEATURE (97)..(97): Xaa is absent, or if Xaa at (96) is Ala, Xaa is Asp
  MISC_FEATURE (98)..(98): Xaa is absent, or if Xaa at (96) is Ala, Xaa is Ala
  MISC_FEATURE (99)..(99): Xaa is absent, or if Xaa at (96) is Ala, Xaa is Ala
  MISC_FEATURE (100)..(100): Xaa is absent, or if Xaa at (96) is Ala, Xaa is Pro
ADAAPADAAPXXXXXXXXXXXXXXXXXXXXXXXXXXXXXXXXXXXXXXXXXXXXXXXXXXXXXXXXXXXXXXXXXXXXXXXXXXXXXXXXXXXXXXXXXX

SEQ ID NO: 546 - protein, 101 aa, Artificial Sequence
  Linker
  MISC_FEATURE (11)..(11): Xaa is absent or Ala
  MISC_FEATURE (12)..(12): Xaa is absent, or if Xaa at (11) is Ala, Xaa is Asp
  MISC_FEATURE (13)..(13): Xaa is absent, or if Xaa at (11) is Ala, Xaa is Ala
  MISC_FEATURE (14)..(14): Xaa is absent, or if Xaa at (11) is Ala, Xaa is Ala
  MISC_FEATURE (15)..(15): Xaa is absent, or if Xaa at (11) is Ala, Xaa is Pro
  MISC_FEATURE (16)..(16): Xaa is absent or Ala
  MISC_FEATURE (17)..(17): Xaa is absent, or if Xaa at (16) is Ala, Xaa is Asp
  MISC_FEATURE (18)..(18): Xaa is absent, or if Xaa at (16) is Ala, Xaa is Ala
  MISC_FEATURE (19)..(19): Xaa is absent, or if Xaa at (16) is Ala, Xaa is Ala
  MISC_FEATURE (20)..(20): Xaa is absent, or if Xaa at (16) is Ala, Xaa is Pro
  MISC_FEATURE (21)..(21): Xaa is absent or Ala
  MISC_FEATURE (22)..(22): Xaa is absent, or if Xaa at (21) is Ala, Xaa is Asp
  MISC_FEATURE (23)..(23): Xaa is absent, or if Xaa at (21) is Ala, Xaa is Ala
  MISC_FEATURE (24)..(24): Xaa is absent, or if Xaa at (21) is Ala, Xaa is Ala
  MISC_FEATURE (25)..(25): Xaa is absent, or if Xaa at (21) is Ala, Xaa is Pro
  MISC_FEATURE (26)..(26): Xaa is absent or Ala
  MISC_FEATURE (27)..(27): Xaa is absent, or if Xaa at (26) is Ala, Xaa is Asp
  MISC_FEATURE (28)..(28): Xaa is absent, or if Xaa at (26) is Ala, Xaa is Ala
  MISC_FEATURE (29)..(29): Xaa is absent, or if Xaa at (26) is Ala, Xaa is Ala
  MISC_FEATURE (30)..(30): Xaa is absent, or if Xaa at (26) is Ala, Xaa is Pro
  MISC_FEATURE (31)..(31): Xaa is absent or Ala
  MISC_FEATURE (32)..(32): Xaa is absent, or if Xaa at (31) is Ala, Xaa is Asp
  MISC_FEATURE (33)..(33): Xaa is absent, or if Xaa at (31) is Ala, Xaa is Ala
  MISC_FEATURE (34)..(34): Xaa is absent, or if Xaa at (31) is Ala, Xaa is Ala
  MISC_FEATURE (35)..(35): Xaa is absent, or if Xaa at (31) is Ala, Xaa is Pro
  MISC_FEATURE (36)..(36): Xaa is absent or Ala
  MISC_FEATURE (37)..(37): Xaa is absent, or if Xaa at (36) is Ala, Xaa is Asp
  MISC_FEATURE (38)..(38): Xaa is absent, or if Xaa at (36) is Ala, Xaa is Ala
  MISC_FEATURE (39)..(39): Xaa is absent, or if Xaa at (36) is Ala, Xaa is Ala
  MISC_FEATURE (40)..(40): Xaa is absent, or if Xaa at (36) is Ala, Xaa is Pro
  MISC_FEATURE (41)..(41): Xaa is absent or Ala
  MISC_FEATURE (42)..(42): Xaa is absent, or if Xaa at (41) is Ala, Xaa is Asp
  MISC_FEATURE (43)..(43): Xaa is absent, or if Xaa at (41) is Ala, Xaa is Ala
  MISC_FEATURE (44)..(44): Xaa is absent, or if Xaa at (41) is Ala, Xaa is Ala
  MISC_FEATURE (45)..(45): Xaa is absent, or if Xaa at (41) is Ala, Xaa is Pro
  MISC_FEATURE (46)..(46): Xaa is absent or Ala
  MISC_FEATURE (47)..(47): Xaa is absent, or if Xaa at (46) is Ala, Xaa is Asp
  MISC_FEATURE (48)..(48): Xaa is absent, or if Xaa at (46) is Ala, Xaa is Ala
  MISC_FEATURE (49)..(49): Xaa is absent, or if Xaa at (46) is Ala, Xaa is Ala
  MISC_FEATURE (50)..(50): Xaa is absent, or if Xaa at (46) is Ala, Xaa is Pro
  MISC_FEATURE (51)..(51): Xaa is absent or Ala
  MISC_FEATURE (52)..(52): Xaa is absent, or if Xaa at (51) is Ala, Xaa is Asp
  MISC_FEATURE (53)..(53): Xaa is absent, or if Xaa at (51) is Ala, Xaa is Ala
  MISC_FEATURE (54)..(54): Xaa is absent, or if Xaa at (51) is Ala, Xaa is Ala
  MISC_FEATURE (55)..(55): Xaa is absent, or if Xaa at (51) is Ala, Xaa is Pro
  MISC_FEATURE (56)..(56): Xaa is absent or Ala
  MISC_FEATURE (57)..(57): Xaa is absent, or if Xaa at (56) is Ala, Xaa is Asp
  MISC_FEATURE (58)..(58): Xaa is absent, or if Xaa at (56) is Ala, Xaa is Ala
  MISC_FEATURE (59)..(59): Xaa is absent, or if Xaa at (56) is Ala, Xaa is Ala
  MISC_FEATURE (60)..(60): Xaa is absent, or if Xaa at (56) is Ala, Xaa is Pro
  MISC_FEATURE (61)..(61): Xaa is absent or Ala
  MISC_FEATURE (62)..(62): Xaa is absent, or if Xaa at (61) is Ala, Xaa is Asp
  MISC_FEATURE (63)..(63): Xaa is absent, or if Xaa at (61) is Ala, Xaa is Ala
  MISC_FEATURE (64)..(64): Xaa is absent, or if Xaa at (61) is Ala, Xaa is Ala
  MISC_FEATURE (65)..(65): Xaa is absent, or if Xaa at (61) is Ala, Xaa is Pro
  MISC_FEATURE (66)..(66): Xaa is absent or Ala
  MISC_FEATURE (67)..(67): Xaa is absent, or if Xaa at (66) is Ala, Xaa is Asp
  MISC_FEATURE (68)..(68): Xaa is absent, or if Xaa at (66) is Ala, Xaa is Ala
  MISC_FEATURE (69)..(69): Xaa is absent, or if Xaa at (66) is Ala, Xaa is Ala
  MISC_FEATURE (70)..(70): Xaa is absent, or if Xaa at (66) is Ala, Xaa is Pro
  MISC_FEATURE (71)..(71): Xaa is absent or Ala
  MISC_FEATURE (72)..(72): Xaa is absent, or if Xaa at (71) is Ala, Xaa is Asp
  MISC_FEATURE (73)..(73): Xaa is absent, or if Xaa at (71) is Ala, Xaa is Ala
  MISC_FEATURE (74)..(74): Xaa is absent, or if Xaa at (71) is Ala, Xaa is Ala
  MISC_FEATURE (75)..(75): Xaa is absent, or if Xaa at (71) is Ala, Xaa is Pro
  MISC_FEATURE (76)..(76): Xaa is absent or Ala
  MISC_FEATURE (77)..(77): Xaa is absent, or if Xaa at (76) is Ala, Xaa is Asp
  MISC_FEATURE (78)..(78): Xaa is absent, or if Xaa at (76) is Ala, Xaa is Ala
  MISC_FEATURE (79)..(79): Xaa is absent, or if Xaa at (76) is Ala, Xaa is Ala
  MISC_FEATURE (80)..(80): Xaa is absent, or if Xaa at (76) is Ala, Xaa is Pro
  MISC_FEATURE (81)..(81): Xaa is absent or Ala
  MISC_FEATURE (82)..(82): Xaa is absent, or if Xaa at (81) is Ala, Xaa is Asp
  MISC_FEATURE (83)..(83): Xaa is absent, or if Xaa at (81) is Ala, Xaa is Ala
  MISC_FEATURE (84)..(84): Xaa is absent, or if Xaa at (81) is Ala, Xaa is Ala
  MISC_FEATURE (85)..(85): Xaa is absent, or if Xaa at (81) is Ala, Xaa is Pro
  MISC_FEATURE (86)..(86): Xaa is absent or Ala
  MISC_FEATURE (87)..(87): Xaa is absent, or if Xaa at (86) is Ala, Xaa is Asp
  MISC_FEATURE (88)..(88): Xaa is absent, or if Xaa at (86) is Ala, Xaa is Ala
  MISC_FEATURE (89)..(89): Xaa is absent, or if Xaa at (86) is Ala, Xaa is Ala
  MISC_FEATURE (90)..(90): Xaa is absent, or if Xaa at (86) is Ala, Xaa is Pro
  MISC_FEATURE (91)..(91): Xaa is absent or Ala
  MISC_FEATURE (92)..(92): Xaa is absent, or if Xaa at (91) is Ala, Xaa is Asp
  MISC_FEATURE (93)..(93): Xaa is absent, or if Xaa at (91) is Ala, Xaa is Ala
  MISC_FEATURE (94)..(94): Xaa is absent, or if Xaa at (91) is Ala, Xaa is Ala
  MISC_FEATURE (95)..(95): Xaa is absent, or if Xaa at (91) is Ala, Xaa is Pro
  MISC_FEATURE (96)..(96): Xaa is absent or Ala
  MISC_FEATURE (97)..(97): Xaa is absent, or if Xaa at (96) is Ala, Xaa is Asp
  MISC_FEATURE (98)..(98): Xaa is absent, or if Xaa at (96) is Ala, Xaa is Ala
  MISC_FEATURE (99)..(99): Xaa is absent, or if Xaa at (96) is Ala, Xaa is Ala
  MISC_FEATURE (100)..(100): Xaa is absent, or if Xaa at (96) is Ala, Xaa is Pro
ADAAPADAAPXXXXXXXXXXXXXXXXXXXXXXXXXXXXXXXXXXXXXXXXXXXXXXXXXXXXXXXXXXXXXXXXXXXXXXXXXXXXXXXXXXXXXXXXXXG

SEQ ID NO: 547 - protein, 100 aa, Artificial Sequence
  Linker
  MISC_FEATURE (11)..(11): Xaa is absent or Gly
  MISC_FEATURE (12)..(12): Xaa is absent, or if Xaa at (11) is Gly, Xaa is Glu
  MISC_FEATURE (13)..(13): Xaa is absent, or if Xaa at (11) is Gly, Xaa is Pro
  MISC_FEATURE (14)..(14): Xaa is absent, or if Xaa at (11) is Gly, Xaa is Gln
  MISC_FEATURE (15)..(15): Xaa is absent, or if Xaa at (11) is Gly, Xaa is Gly
  MISC_FEATURE (16)..(16): Xaa is absent or Gly
  MISC_FEATURE (17)..(17): Xaa is absent, or if Xaa at (16) is Gly, Xaa is Glu
  MISC_FEATURE (18)..(18): Xaa is absent, or if Xaa at (16) is Gly, Xaa is Pro
  MISC_FEATURE (19)..(19): Xaa is absent, or if Xaa at (16) is Gly, Xaa is Gln
  MISC_FEATURE (20)..(20): Xaa is absent, or if Xaa at (16) is Gly, Xaa is Gly
  MISC_FEATURE (21)..(21): Xaa is absent or Gly
  MISC_FEATURE (22)..(22): Xaa is absent, or if Xaa at (21) is Gly, Xaa is Glu
  MISC_FEATURE (23)..(23): Xaa is absent, or if Xaa at (21) is Gly, Xaa is Pro
  MISC_FEATURE (24)..(24): Xaa is absent, or if Xaa at (21) is Gly, Xaa is Gln
  MISC_FEATURE (25)..(25): Xaa is absent, or if Xaa at (21) is Gly, Xaa is Gly
  MISC_FEATURE (26)..(26): Xaa is absent or Gly
  MISC_FEATURE (27)..(27): Xaa is absent, or if Xaa at (26) is Gly, Xaa is Glu
  MISC_FEATURE (28)..(28): Xaa is absent, or if Xaa at (26) is Gly, Xaa is Pro
  MISC_FEATURE (29)..(29): Xaa is absent, or if Xaa at (26) is Gly, Xaa is Gln
  MISC_FEATURE (30)..(30): Xaa is absent, or if Xaa at (26) is Gly, Xaa is Gly
  MISC_FEATURE (31)..(31): Xaa is absent or Gly
  MISC_FEATURE (32)..(32): Xaa is absent, or if Xaa at (31) is Gly, Xaa is Glu
  MISC_FEATURE (33)..(33): Xaa is absent, or if Xaa at (31) is Gly, Xaa is Pro
  MISC_FEATURE (34)..(34): Xaa is absent, or if Xaa at (31) is Gly, Xaa is Gln
  MISC_FEATURE (35)..(35): Xaa is absent, or if Xaa at (31) is Gly, Xaa is Gly
  MISC_FEATURE (36)..(36): Xaa is absent or Gly
  MISC_FEATURE (37)..(37): Xaa is absent, or if Xaa at (36) is Gly, Xaa is Glu
  MISC_FEATURE (38)..(38): Xaa is absent, or if Xaa at (36) is Gly, Xaa is Pro
  MISC_FEATURE (39)..(39): Xaa is absent, or if Xaa at (36) is Gly, Xaa is Gln
  MISC_FEATURE (40)..(40): Xaa is absent, or if Xaa at (36) is Gly, Xaa is Gly
  MISC_FEATURE (41)..(41): Xaa is absent or Gly
  MISC_FEATURE (42)..(42): Xaa is absent, or if Xaa at (41) is Gly, Xaa is Glu
  MISC_FEATURE (43)..(43): Xaa is absent, or if Xaa at (41) is Gly, Xaa is Pro
  MISC_FEATURE (44)..(44): Xaa is absent, or if Xaa at (41) is Gly, Xaa is Gly
  MISC_FEATURE (45)..(45): Xaa is absent, or if Xaa at (41) is Gly, Xaa is Gly
  MISC_FEATURE (46)..(46): Xaa is absent or Gly
  MISC_FEATURE (47)..(47): Xaa is absent, or if Xaa at (46) is Gly, Xaa is Glu
  MISC_FEATURE (48)..(48): Xaa is absent, or if Xaa at (46) is Gly, Xaa is Pro
  MISC_FEATURE (49)..(49): Xaa is absent, or if Xaa at (46) is Gly, Xaa is Gln
  MISC_FEATURE (50)..(50): Xaa is absent, or if Xaa at (46) is Gly, Xaa is Gly
  MISC_FEATURE (51)..(51): Xaa is absent or Gly
  MISC_FEATURE (52)..(52): Xaa is absent, or if Xaa at (51) is Gly, Xaa is Glu
  MISC_FEATURE (53)..(53): Xaa is absent, or if Xaa at (51) is Gly, Xaa is Pro
  MISC_FEATURE (54)..(54): Xaa is absent, or if Xaa at (51) is Gly, Xaa is Gln
  MISC_FEATURE (55)..(55): Xaa is absent, or if Xaa at (51) is Gly, Xaa is Gly
  MISC_FEATURE (56)..(56): Xaa is absent or Gly
  MISC_FEATURE (57)..(57): Xaa is absent, or if Xaa at (56) is Gly, Xaa is Glu
  MISC_FEATURE (58)..(58): Xaa is absent, or if Xaa at (56) is Gly, Xaa is Pro
  MISC_FEATURE (59)..(59): Xaa is absent, or if Xaa at (56) is Gly, Xaa is Gln
  MISC_FEATURE (60)..(60): Xaa is absent, or if Xaa at (56) is Gly, Xaa is Gly
  MISC_FEATURE (61)..(61): Xaa is absent or Gly
  MISC_FEATURE (62)..(62): Xaa is absent, or if Xaa at (61) is Gly, Xaa is Glu
  MISC_FEATURE (63)..(63): Xaa is absent, or if Xaa at (61) is Gly, Xaa is Pro
  MISC_FEATURE (64)..(64): Xaa is absent, or if Xaa at (61) is Gly, Xaa is Gln
  MISC_FEATURE (65)..(65): Xaa is absent, or if Xaa at (61) is Gly, Xaa is Gly
  MISC_FEATURE (66)..(66): Xaa is absent or Gly
  MISC_FEATURE (67)..(67): Xaa is absent, or if Xaa at (66) is Gly, Xaa is Glu
  MISC_FEATURE (68)..(68): Xaa is absent, or if Xaa at (66) is Gly, Xaa is Pro
  MISC_FEATURE (69)..(69): Xaa is absent, or if Xaa at (66) is Gly, Xaa is Gln
  MISC_FEATURE (70)..(70): Xaa is absent, or if Xaa at (66) is Gly, Xaa is Gly
  MISC_FEATURE (71)..(71): Xaa is absent or Gly
  MISC_FEATURE (72)..(72): Xaa is absent, or if Xaa at (71) is Gly, Xaa is Glu
  MISC_FEATURE (73)..(73): Xaa is absent, or if Xaa at (71) is Gly, Xaa is Pro
  MISC_FEATURE (74)..(74): Xaa is absent, or if Xaa at (71) is Gly, Xaa is Gln
  MISC_FEATURE (75)..(75): Xaa is absent, or if Xaa at (71) is Gly, Xaa is Gly
  MISC_FEATURE (76)..(76): Xaa is absent or Gly
  MISC_FEATURE (77)..(77): Xaa is absent, or if Xaa at (76) is Gly, Xaa is Glu
  MISC_FEATURE (78)..(78): Xaa is absent, or if Xaa at (76) is Gly, Xaa is Pro
  MISC_FEATURE (79)..(79): Xaa is absent, or if Xaa at (76) is Gly, Xaa is Gln
  MISC_FEATURE (80)..(80): Xaa is absent, or if Xaa at (76) is Gly, Xaa is Gly
  MISC_FEATURE (81)..(81): Xaa is absent or Gly
  MISC_FEATURE (82)..(82): Xaa is absent, or if Xaa at (81) is Gly, Xaa is Glu
  MISC_FEATURE (83)..(83): Xaa is absent, or if Xaa at (81) is Gly, Xaa is Pro
  MISC_FEATURE (84)..(84): Xaa is absent, or if Xaa at (81) is Gly, Xaa is Gln
  MISC_FEATURE (85)..(85): Xaa is absent, or if Xaa at (81) is Gly, Xaa is Gly
  MISC_FEATURE (86)..(86): Xaa is absent or Gly
  MISC_FEATURE (87)..(87): Xaa is absent, or if Xaa at (86) is Gly, Xaa is Glu
  MISC_FEATURE (88)..(88): Xaa is absent, or if Xaa at (86) is Gly, Xaa is Pro
  MISC_FEATURE (89)..(89): Xaa is absent, or if Xaa at (86) is Gly, Xaa is Gln
  MISC_FEATURE (90)..(90): Xaa is absent, or if Xaa at (86) is Gly, Xaa is Gly
  MISC_FEATURE (91)..(91): Xaa is absent or Gly
  MISC_FEATURE (92)..(92): Xaa is absent, or if Xaa at (91) is Gly, Xaa is Glu
  MISC_FEATURE (93)..(93): Xaa is absent, or if Xaa at (91) is Gly, Xaa is Pro
  MISC_FEATURE (94)..(94): Xaa is absent, or if Xaa at (91) is Gly, Xaa is Gln
  MISC_FEATURE (95)..(95): Xaa is absent, or if Xaa at (91) is Gly, Xaa is Gly
  MISC_FEATURE (96)..(96): Xaa is absent or Gly
  MISC_FEATURE (97)..(97): Xaa is absent, or if Xaa at (96) is Gly, Xaa is Glu
  MISC_FEATURE (98)..(98): Xaa is absent, or if Xaa at (96) is Gly, Xaa is Pro
  MISC_FEATURE (99)..(99): Xaa is absent, or if Xaa at (96) is Gly, Xaa is Gln
  MISC_FEATURE (100)..(100): Xaa is absent, or if Xaa at (96) is Gly, Xaa is Gly
GEPQGGEPQGXXXXXXXXXXXXXXXXXXXXXXXXXXXXXXXXXXXXXXXXXXXXXXXXXXXXXXXXXXXXXXXXXXXXXXXXXXXXXXXXXXXXXXXXXX

SEQ ID NO: 548 - protein, 101 aa, Artificial Sequence
  Linker
  MISC_FEATURE (11)..(11): Xaa is absent or Gly
  MISC_FEATURE (12)..(12): Xaa is absent, or if Xaa at (11) is Gly, Xaa is Glu
  MISC_FEATURE (13)..(13): Xaa is absent, or if Xaa at (11) is Gly, Xaa is Pro
  MISC_FEATURE (14)..(14): Xaa is absent, or if Xaa at (11) is Gly, Xaa is Gln
  MISC_FEATURE (15)..(15): Xaa is absent, or if Xaa at (11) is Gly, Xaa is Gly
  MISC_FEATURE (16)..(16): Xaa is absent or Gly
  MISC_FEATURE (17)..(17): Xaa is absent, or if Xaa at (16) is Gly, Xaa is Glu
  MISC_FEATURE (18)..(18): Xaa is absent, or if Xaa at (16) is Gly, Xaa is Pro
  MISC_FEATURE (19)..(19): Xaa is absent, or if Xaa at (16) is Gly, Xaa is Gln
  MISC_FEATURE (20)..(20): Xaa is absent, or if Xaa at (16) is Gly, Xaa is Gly
  MISC_FEATURE (21)..(21): Xaa is absent or Gly
  MISC_FEATURE (22)..(22): Xaa is absent, or if Xaa at (21) is Gly, Xaa is Glu
  MISC_FEATURE (23)..(23): Xaa is absent, or if Xaa at (21) is Gly, Xaa is Pro
  MISC_FEATURE (24)..(24): Xaa is absent, or if Xaa at (21) is Gly, Xaa is Gln
  MISC_FEATURE (25)..(25): Xaa is absent, or if Xaa at (21) is Gly, Xaa is Gly
  MISC_FEATURE (26)..(26): Xaa is absent or Gly
  MISC_FEATURE (27)..(27): Xaa is absent, or if Xaa at (26) is Gly, Xaa is Glu
  MISC_FEATURE (28)..(28): Xaa is absent, or if Xaa at (26) is Gly, Xaa is Pro
  MISC_FEATURE (29)..(29): Xaa is absent, or if Xaa at (26) is Gly, Xaa is Gln
  MISC_FEATURE (30)..(30): Xaa is absent, or if Xaa at (26) is Gly, Xaa is Gly
  MISC_FEATURE (31)..(31): Xaa is absent or Gly
  MISC_FEATURE (32)..(32): Xaa is absent, or if Xaa at (31) is Gly, Xaa is Glu
  MISC_FEATURE (33)..(33): Xaa is absent, or if Xaa at (31) is Gly, Xaa is Pro
  MISC_FEATURE (34)..(34): Xaa is absent, or if Xaa at (31) is Gly, Xaa is Gln
  MISC_FEATURE (35)..(35): Xaa is absent, or if Xaa at (31) is Gly, Xaa is Gly
  MISC_FEATURE (36)..(36): Xaa is absent or Gly
  MISC_FEATURE (37)..(37): Xaa is absent, or if Xaa at (36) is Gly, Xaa is Glu
  MISC_FEATURE (38)..(38): Xaa is absent, or if Xaa at (36) is Gly, Xaa is Pro
  MISC_FEATURE (39)..(39): Xaa is absent, or if Xaa at (36) is Gly, Xaa is Gln
  MISC_FEATURE (40)..(40): Xaa is absent, or if Xaa at (36) is Gly, Xaa is Gly
  MISC_FEATURE (41)..(41): Xaa is absent or Gly
  MISC_FEATURE (42)..(42): Xaa is absent, or if Xaa at (41) is Gly, Xaa is Glu
  MISC_FEATURE (43)..(43): Xaa is absent, or if Xaa at (41) is Gly, Xaa is Pro
  MISC_FEATURE (44)..(44): Xaa is absent, or if Xaa at (41) is Gly, Xaa is Gly
  MISC_FEATURE (45)..(45): Xaa is absent, or if Xaa at (41) is Gly, Xaa is Gly
  MISC_FEATURE (46)..(46): Xaa is absent or Gly
  MISC_FEATURE (47)..(47): Xaa is absent, or if Xaa at (46) is Gly, Xaa is Glu
  MISC_FEATURE (48)..(48): Xaa is absent, or if Xaa at (46) is Gly, Xaa is Pro
  MISC_FEATURE (49)..(49): Xaa is absent, or if Xaa at (46) is Gly, Xaa is Gln
  MISC_FEATURE (50)..(50): Xaa is absent, or if Xaa at (46) is Gly, Xaa is Gly
  MISC_FEATURE (51)..(51): Xaa is absent or Gly
  MISC_FEATURE (52)..(52): Xaa is absent, or if Xaa at (51) is Gly, Xaa is Glu
  MISC_FEATURE (53)..(53): Xaa is absent, or if Xaa at (51) is Gly, Xaa is Pro
  MISC_FEATURE (54)..(54): Xaa is absent, or if Xaa at (51) is Gly, Xaa is Gln
  MISC_FEATURE (55)..(55): Xaa is absent, or if Xaa at (51) is Gly, Xaa is Gly
  MISC_FEATURE (56)..(56): Xaa is absent or Gly
  MISC_FEATURE (57)..(57): Xaa is absent, or if Xaa at (56) is Gly, Xaa is Glu
  MISC_FEATURE (58)..(58): Xaa is absent, or if Xaa at (56) is Gly, Xaa is Pro
  MISC_FEATURE (59)..(59): Xaa is absent, or if Xaa at (56) is Gly, Xaa is Gln
  MISC_FEATURE (60)..(60): Xaa is absent, or if Xaa at (56) is Gly, Xaa is Gly
  MISC_FEATURE (61)..(61): Xaa is absent or Gly
  MISC_FEATURE (62)..(62): Xaa is absent, or if Xaa at (61) is Gly, Xaa is Glu
  MISC_FEATURE (63)..(63): Xaa is absent, or if Xaa at (61) is Gly, Xaa is Pro
  MISC_FEATURE (64)..(64): Xaa is absent, or if Xaa at (61) is Gly, Xaa is Gln
  MISC_FEATURE (65)..(65): Xaa is absent, or if Xaa at (61) is Gly, Xaa is Gly
  MISC_FEATURE (66)..(66): Xaa is absent or Gly
  MISC_FEATURE (67)..(67): Xaa is absent, or if Xaa at (66) is Gly, Xaa is Glu
  MISC_FEATURE (68)..(68): Xaa is absent, or if Xaa at (66) is Gly, Xaa is Pro
  MISC_FEATURE (69)..(69): Xaa is absent, or if Xaa at (66) is Gly, Xaa is Gln
  MISC_FEATURE (70)..(70): Xaa is absent, or if Xaa at (66) is Gly, Xaa is Gly
  MISC_FEATURE (71)..(71): Xaa is absent or Gly
  MISC_FEATURE (72)..(72): Xaa is absent, or if Xaa at (71) is Gly, Xaa is Glu
  MISC_FEATURE (73)..(73): Xaa is absent, or if Xaa at (71) is Gly, Xaa is Pro
  MISC_FEATURE (74)..(74): Xaa is absent, or if Xaa at (71) is Gly, Xaa is Gln
  MISC_FEATURE (75)..(75): Xaa is absent, or if Xaa at (71) is Gly, Xaa is Gly
  MISC_FEATURE (76)..(76): Xaa is absent or Gly
  MISC_FEATURE (77)..(77): Xaa is absent, or if Xaa at (76) is Gly, Xaa is Glu
  MISC_FEATURE (78)..(78): Xaa is absent, or if Xaa at (76) is Gly, Xaa is Pro
  MISC_FEATURE (79)..(79): Xaa is absent, or if Xaa at (76) is Gly, Xaa is Gln
  MISC_FEATURE (80)..(80): Xaa is absent, or if Xaa at (76) is Gly, Xaa is Gly
  MISC_FEATURE (81)..(81): Xaa is absent or Gly
  MISC_FEATURE (82)..(82): Xaa is absent, or if Xaa at (81) is Gly, Xaa is Glu
  MISC_FEATURE (83)..(83): Xaa is absent, or if Xaa at (81) is Gly, Xaa is Pro
  MISC_FEATURE (84)..(84): Xaa is absent, or if Xaa at (81) is Gly, Xaa is Gln
  MISC_FEATURE (85)..(85): Xaa is absent, or if Xaa at (81) is Gly, Xaa is Gly
  MISC_FEATURE (86)..(86): Xaa is absent or Gly
  MISC_FEATURE (87)..(87): Xaa is absent, or if Xaa at (86) is Gly, Xaa is Glu
  MISC_FEATURE (88)..(88): Xaa is absent, or if Xaa at (86) is Gly, Xaa is Pro
  MISC_FEATURE (89)..(89): Xaa is absent, or if Xaa at (86) is Gly, Xaa is Gln
  MISC_FEATURE (90)..(90): Xaa is absent, or if Xaa at (86) is Gly, Xaa is Gly
  MISC_FEATURE (91)..(91): Xaa is absent or Gly
  MISC_FEATURE (92)..(92): Xaa is absent, or if Xaa at (91) is Gly, Xaa is Glu
  MISC_FEATURE (93)..(93): Xaa is absent, or if Xaa at (91) is Gly, Xaa is Pro
  MISC_FEATURE (94)..(94): Xaa is absent, or if Xaa at (91) is Gly, Xaa is Gln
  MISC_FEATURE (95)..(95): Xaa is absent, or if Xaa at (91) is Gly, Xaa is Gly
  MISC_FEATURE (96)..(96): Xaa is absent or Gly
  MISC_FEATURE (97)..(97): Xaa is absent, or if Xaa at (96) is Gly, Xaa is Glu
  MISC_FEATURE (98)..(98): Xaa is absent, or if Xaa at (96) is Gly, Xaa is Pro
  MISC_FEATURE (99)..(99): Xaa is absent, or if Xaa at (96) is Gly, Xaa is Gln
  MISC_FEATURE (100)..(100): Xaa is absent, or if Xaa at (96) is Gly, Xaa is Gly
GEPQGGEPQGXXXXXXXXXXXXXXXXXXXXXXXXXXXXXXXXXXXXXXXXXXXXXXXXXXXXXXXXXXXXXXXXXXXXXXXXXXXXXXXXXXXXXXXXXXG

SEQ ID NO: 549 - protein, 100 aa, Artificial Sequence
  Linker
  MISC_FEATURE (11)..(11): Xaa is absent or Ala
  MISC_FEATURE (12)..(12): Xaa is absent, or if Xaa at (11) is Ala, Xaa is Gly
  MISC_FEATURE (13)..(13): Xaa is absent, or if Xaa at (11) is Ala, Xaa is Gly
  MISC_FEATURE (14)..(14): Xaa is absent, or if Xaa at (11) is Ala, Xaa is Glu
  MISC_FEATURE (15)..(15): Xaa is absent, or if Xaa at (11) is Ala, Xaa is Pro
  MISC_FEATURE (16)..(16): Xaa is absent or Ala
  MISC_FEATURE (17)..(17): Xaa is absent, or if Xaa at (16) is Ala, Xaa is Gly
  MISC_FEATURE (18)..(18): Xaa is absent, or if Xaa at (16) is Ala, Xaa is Gly
  MISC_FEATURE (19)..(19): Xaa is absent, or if Xaa at (16) is Ala, Xaa is Glu
  MISC_FEATURE (20)..(20): Xaa is absent, or if Xaa at (16) is Ala, Xaa is Pro
  MISC_FEATURE (21)..(21): Xaa is absent or Ala
  MISC_FEATURE (22)..(22): Xaa is absent, or if Xaa at (21) is Ala, Xaa is Gly
  MISC_FEATURE (23)..(23): Xaa is absent, or if Xaa at (21) is Ala, Xaa is Gly
  MISC_FEATURE (24)..(24): Xaa is absent, or if Xaa at (21) is Ala, Xaa is Glu
  MISC_FEATURE (25)..(25): Xaa is absent, or if Xaa at (21) is Ala, Xaa is Pro
  MISC_FEATURE (26)..(26): Xaa is absent or Ala
  MISC_FEATURE (27)..(27): Xaa is absent, or if Xaa at (26) is Ala, Xaa is Gly
  MISC_FEATURE (28)..(28): Xaa is absent, or if Xaa at (26) is Ala, Xaa is Gly
  MISC_FEATURE (29)..(29): Xaa is absent, or if Xaa at (26) is Ala, Xaa is Glu
  MISC_FEATURE (30)..(30): Xaa is absent, or if Xaa at (26) is Ala, Xaa is Pro
  MISC_FEATURE (31)..(31): Xaa is absent or Ala
  MISC_FEATURE (32)..(32): Xaa is absent, or if Xaa at (31) is Ala, Xaa is Gly
  MISC_FEATURE (33)..(33): Xaa is absent, or if Xaa at (31) is Ala, Xaa is Gly
  MISC_FEATURE (34)..(34): Xaa is absent, or if Xaa at (31) is Ala, Xaa is Glu
  MISC_FEATURE (35)..(35): Xaa is absent, or if Xaa at (31) is Ala, Xaa is Pro
  MISC_FEATURE (36)..(36): Xaa is absent or Ala
  MISC_FEATURE (37)..(37): Xaa is absent, or if Xaa at (36) is Ala, Xaa is Gly
  MISC_FEATURE (38)..(38): Xaa is absent, or if Xaa at (36) is Ala, Xaa is Gly
  MISC_FEATURE (39)..(39): Xaa is absent, or if Xaa at (36) is Ala, Xaa is Glu
  MISC_FEATURE (40)..(40): Xaa is absent, or if Xaa at (36) is Ala, Xaa is Pro
  MISC_FEATURE (41)..(41): Xaa is absent or Ala
  MISC_FEATURE (42)..(42): Xaa is absent, or if Xaa at (41) is Ala, Xaa is Gly
  MISC_FEATURE (43)..(43): Xaa is absent, or if Xaa at (41) is Ala, Xaa is Gly
  MISC_FEATURE (44)..(44): Xaa is absent, or if Xaa at (41) is Ala, Xaa is Glu
  MISC_FEATURE (45)..(45): Xaa is absent, or if Xaa at (41) is Ala, Xaa is Pro
  MISC_FEATURE (46)..(46): Xaa is absent or Ala
  MISC_FEATURE (47)..(47): Xaa is absent, or if Xaa at (46) is Ala, Xaa is Gly
  MISC_FEATURE (48)..(48): Xaa is absent, or if Xaa at (46) is Ala, Xaa is Gly
  MISC_FEATURE (49)..(49): Xaa is absent, or if Xaa at (46) is Ala, Xaa is Glu
  MISC_FEATURE (50)..(50): Xaa is absent, or if Xaa at (46) is Ala, Xaa is Pro
  MISC_FEATURE (51)..(51): Xaa is absent or Ala
  MISC_FEATURE (52)..(52): Xaa is absent, or if Xaa at (51) is Ala, Xaa is Gly
  MISC_FEATURE (53)..(53): Xaa is absent, or if Xaa at (51) is Ala, Xaa is Gly
  MISC_FEATURE (54)..(54): Xaa is absent, or if Xaa at (51) is Ala, Xaa is Glu
  MISC_FEATURE (55)..(55): Xaa is absent, or if Xaa at (51) is Ala, Xaa is Pro
  MISC_FEATURE (56)..(56): Xaa is absent or Ala
  MISC_FEATURE (57)..(57): Xaa is absent, or if Xaa at (56) is Ala, Xaa is Gly
  MISC_FEATURE (58)..(58): Xaa is absent, or if Xaa at (56) is Ala, Xaa is Gly
  MISC_FEATURE (59)..(59): Xaa is absent, or if Xaa at (56) is Ala, Xaa is Glu
  MISC_FEATURE (60)..(60): Xaa is absent, or if Xaa at (56) is Ala, Xaa is Pro
  MISC_FEATURE (61)..(61): Xaa is absent or Ala
  MISC_FEATURE (62)..(62): Xaa is absent, or if Xaa at (61) is Ala, Xaa is Gly
  MISC_FEATURE (63)..(63): Xaa is absent, or if Xaa at (61) is Ala, Xaa is Gly
  MISC_FEATURE (64)..(64): Xaa is absent, or if Xaa at (61) is Ala, Xaa is Glu
  MISC_FEATURE (65)..(65): Xaa is absent, or if Xaa at (61) is Ala, Xaa is Pro
  MISC_FEATURE (66)..(66): Xaa is absent or Ala
  MISC_FEATURE (67)..(67): Xaa is absent, or if Xaa at (66) is Ala, Xaa is Gly
  MISC_FEATURE (68)..(68): Xaa is absent, or if Xaa at (66) is Ala, Xaa is Gly
  MISC_FEATURE (69)..(69): Xaa is absent, or if Xaa at (66) is Ala, Xaa is Glu
  MISC_FEATURE (70)..(70): Xaa is absent, or if Xaa at (66) is Ala, Xaa is Pro
  MISC_FEATURE (71)..(71): Xaa is absent or Ala
  MISC_FEATURE (72)..(72): Xaa is absent, or if Xaa at (71) is Ala, Xaa is Gly
  MISC_FEATURE (73)..(73): Xaa is absent, or if Xaa at (71) is Ala, Xaa is Gly
  MISC_FEATURE (74)..(74): Xaa is absent, or if Xaa at (71) is Ala, Xaa is Glu
  MISC_FEATURE (75)..(75): Xaa is absent, or if Xaa at (71) is Ala, Xaa is Pro
  MISC_FEATURE (76)..(76): Xaa is absent or Ala
  MISC_FEATURE (77)..(77): Xaa is absent, or if Xaa at (76) is Ala, Xaa is Gly
  MISC_FEATURE (78)..(78): Xaa is absent, or if Xaa at (76) is Ala, Xaa is Gly
  MISC_FEATURE (79)..(79): Xaa is absent, or if Xaa at (76) is Ala, Xaa is Glu
  MISC_FEATURE (80)..(80): Xaa is absent, or if Xaa at (76) is Ala, Xaa is Pro
  MISC_FEATURE (81)..(81): Xaa is absent or Ala
  MISC_FEATURE (82)..(82): Xaa is absent, or if Xaa at (81) is Ala, Xaa is Gly
  MISC_FEATURE (83)..(83): Xaa is absent, or if Xaa at (81) is Ala, Xaa is Gly
  MISC_FEATURE (84)..(84): Xaa is absent, or if Xaa at (81) is Ala, Xaa is Glu
  MISC_FEATURE (85)..(85): Xaa is absent, or if Xaa at (81) is Ala, Xaa is Pro
  MISC_FEATURE (86)..(86): Xaa is absent or Ala
  MISC_FEATURE (87)..(87): Xaa is absent, or if Xaa at (86) is Ala, Xaa is Gly
  MISC_FEATURE (88)..(88): Xaa is absent, or if Xaa at (86) is Ala, Xaa is Gly
  MISC_FEATURE (89)..(89): Xaa is absent, or if Xaa at (86) is Ala, Xaa is Glu
  MISC_FEATURE (90)..(90): Xaa is absent, or if Xaa at (86) is Ala, Xaa is Pro
  MISC_FEATURE (91)..(91): Xaa is absent or Ala
  MISC_FEATURE (92)..(92): Xaa is absent, or if Xaa at (91) is Ala, Xaa is Gly
  MISC_FEATURE (93)..(93): Xaa is absent, or if Xaa at (91) is Ala, Xaa is Gly
  MISC_FEATURE (94)..(94): Xaa is absent, or if Xaa at (91) is Ala, Xaa is Glu
  MISC_FEATURE (95)..(95): Xaa is absent, or if Xaa at (91) is Ala, Xaa is Pro
  MISC_FEATURE (96)..(96): Xaa is absent or Ala
  MISC_FEATURE (97)..(97): Xaa is absent, or if Xaa at (96) is Ala, Xaa is Gly
  MISC_FEATURE (98)..(98): Xaa is absent, or if Xaa at (96) is Ala, Xaa is Gly
  MISC_FEATURE (99)..(99): Xaa is absent, or if Xaa at (96) is Ala, Xaa is Glu
  MISC_FEATURE (100)..(100): Xaa is absent, or if Xaa at (96) is Ala, Xaa is Pro
AGGEPAGGEPXXXXXXXXXXXXXXXXXXXXXXXXXXXXXXXXXXXXXXXXXXXXXXXXXXXXXXXXXXXXXXXXXXXXXXXXXXXXXXXXXXXXXXXXXX

SEQ ID NO: 550 - protein, 101 aa, Artificial Sequence
  Linker
  MISC_FEATURE (11)..(11): Xaa is absent or Ala
  MISC_FEATURE (12)..(12): Xaa is absent, or if Xaa at (11) is Ala, Xaa is Gly
  MISC_FEATURE (13)..(13): Xaa is absent, or if Xaa at (11) is Ala, Xaa is Gly
  MISC_FEATURE (14)..(14): Xaa is absent, or if Xaa at (11) is Ala, Xaa is Glu
  MISC_FEATURE (15)..(15): Xaa is absent, or if Xaa at (11) is Ala, Xaa is Pro
  MISC_FEATURE (16)..(16): Xaa is absent or Ala
  MISC_FEATURE (17)..(17): Xaa is absent, or if Xaa at (16) is Ala, Xaa is Gly
  MISC_FEATURE (18)..(18): Xaa is absent, or if Xaa at (16) is Ala, Xaa is Gly
  MISC_FEATURE (19)..(19): Xaa is absent, or if Xaa at (16) is Ala, Xaa is Glu
  MISC_FEATURE (20)..(20): Xaa is absent, or if Xaa at (16) is Ala, Xaa is Pro
  MISC_FEATURE (21)..(21): Xaa is absent or Ala
  MISC_FEATURE (22)..(22): Xaa is absent, or if Xaa at (21) is Ala, Xaa is Gly
  MISC_FEATURE (23)..(23): Xaa is absent, or if Xaa at (21) is Ala, Xaa is Gly
  MISC_FEATURE (24)..(24): Xaa is absent, or if Xaa at (21) is Ala, Xaa is Glu
  MISC_FEATURE (25)..(25): Xaa is absent, or if Xaa at (21) is Ala, Xaa is Pro
  MISC_FEATURE (26)..(26): Xaa is absent or Ala
  MISC_FEATURE (27)..(27): Xaa is absent, or if Xaa at (26) is Ala, Xaa is Gly
  MISC_FEATURE (28)..(28): Xaa is absent, or if Xaa at (26) is Ala, Xaa is Gly
  MISC_FEATURE (29)..(29): Xaa is absent, or if Xaa at (26) is Ala, Xaa is Glu
  MISC_FEATURE (30)..(30): Xaa is absent, or if Xaa at (26) is Ala, Xaa is Pro
  MISC_FEATURE (31)..(31): Xaa is absent or Ala
  MISC_FEATURE (32)..(32): Xaa is absent, or if Xaa at (31) is Ala, Xaa is Gly
  MISC_FEATURE (33)..(33): Xaa is absent, or if Xaa at (31) is Ala, Xaa is Gly
  MISC_FEATURE (34)..(34): Xaa is absent, or if Xaa at (31) is Ala, Xaa is Glu
  MISC_FEATURE (35)..(35): Xaa is absent, or if Xaa at (31) is Ala, Xaa is Pro
  MISC_FEATURE (36)..(36): Xaa is absent or Ala
  MISC_FEATURE (37)..(37): Xaa is absent, or if Xaa at (36) is Ala, Xaa is Gly
  MISC_FEATURE (38)..(38): Xaa is absent, or if Xaa at (36) is Ala, Xaa is Gly
  MISC_FEATURE (39)..(39): Xaa is absent, or if Xaa at (36) is Ala, Xaa is Glu
  MISC_FEATURE (40)..(40): Xaa is absent, or if Xaa at (36) is Ala, Xaa is Pro
  MISC_FEATURE (41)..(41): Xaa is absent or Ala
  MISC_FEATURE (42)..(42): Xaa is absent, or if Xaa at (41) is Ala, Xaa is Gly
  MISC_FEATURE (43)..(43): Xaa is absent, or if Xaa at (41) is Ala, Xaa is Gly
  MISC_FEATURE (44)..(44): Xaa is absent, or if Xaa at (41) is Ala, Xaa is Glu
  MISC_FEATURE (45)..(45): Xaa is absent, or if Xaa at (41) is Ala, Xaa is Pro
  MISC_FEATURE (46)..(46): Xaa is absent or Ala
  MISC_FEATURE (47)..(47): Xaa is absent, or if Xaa at (46) is Ala, Xaa is Gly
  MISC_FEATURE (48)..(48): Xaa is absent, or if Xaa at (46) is Ala, Xaa is Gly
  MISC_FEATURE (49)..(49): Xaa is absent, or if Xaa at (46) is Ala, Xaa is Glu
  MISC_FEATURE (50)..(50): Xaa is absent, or if Xaa at (46) is Ala, Xaa is Pro
  MISC_FEATURE (51)..(51): Xaa is absent or Ala
  MISC_FEATURE (52)..(52): Xaa is absent, or if Xaa at (51) is Ala, Xaa is Gly
  MISC_FEATURE (53)..(53): Xaa is absent, or if Xaa at (51) is Ala, Xaa is Gly
  MISC_FEATURE (54)..(54): Xaa is absent, or if Xaa at (51) is Ala, Xaa is Glu
  MISC_FEATURE (55)..(55): Xaa is absent, or if Xaa at (51) is Ala, Xaa is Pro
  MISC_FEATURE (56)..(56): Xaa is absent or Ala
  MISC_FEATURE (57)..(57): Xaa is absent, or if Xaa at (56) is Ala, Xaa is Gly
  MISC_FEATURE (58)..(58): Xaa is absent, or if Xaa at (56) is Ala, Xaa is Gly
  MISC_FEATURE (59)..(59): Xaa is absent, or if Xaa at (56) is Ala, Xaa is Glu
  MISC_FEATURE (60)..(60): Xaa is absent, or if Xaa at (56) is Ala, Xaa is Pro
  MISC_FEATURE (61)..(61): Xaa is absent or Ala
  MISC_FEATURE (62)..(62): Xaa is absent, or if Xaa at (61) is Ala, Xaa is Gly
  MISC_FEATURE (63)..(63): Xaa is absent, or if Xaa at (61) is Ala, Xaa is Gly
  MISC_FEATURE (64)..(64): Xaa is absent, or if Xaa at (61) is Ala, Xaa is Glu
  MISC_FEATURE (65)..(65): Xaa is absent, or if Xaa at (61) is Ala, Xaa is Pro
  MISC_FEATURE (66)..(66): Xaa is absent or Ala
  MISC_FEATURE (67)..(67): Xaa is absent, or if Xaa at (66) is Ala, Xaa is Gly
  MISC_FEATURE (68)..(68): Xaa is absent, or if Xaa at (66) is Ala, Xaa is Gly
  MISC_FEATURE (69)..(69): Xaa is absent, or if Xaa at (66) is Ala, Xaa is Glu
  MISC_FEATURE (70)..(70): Xaa is absent, or if Xaa at (66) is Ala, Xaa is Pro
  MISC_FEATURE (71)..(71): Xaa is absent or Ala
  MISC_FEATURE (72)..(72): Xaa is absent, or if Xaa at (71) is Ala, Xaa is Gly
  MISC_FEATURE (73)..(73): Xaa is absent, or if Xaa at (71) is Ala, Xaa is Gly
  MISC_FEATURE (74)..(74): Xaa is absent, or if Xaa at (71) is Ala, Xaa is Glu
  MISC_FEATURE (75)..(75): Xaa is absent, or if Xaa at (71) is Ala, Xaa is Pro
  MISC_FEATURE (76)..(76): Xaa is absent or Ala
  MISC_FEATURE (77)..(77): Xaa is absent, or if Xaa at (76) is Ala, Xaa is Gly
  MISC_FEATURE (78)..(78): Xaa is absent, or if Xaa at (76) is Ala, Xaa is Gly
  MISC_FEATURE (79)..(79): Xaa is absent, or if Xaa at (76) is Ala, Xaa is Glu
  MISC_FEATURE (80)..(80): Xaa is absent, or if Xaa at (76) is Ala, Xaa is Pro
  MISC_FEATURE (81)..(81): Xaa is absent or Ala
  MISC_FEATURE (82)..(82): Xaa is absent, or if Xaa at (81) is Ala, Xaa is Gly
  MISC_FEATURE (83)..(83): Xaa is absent, or if Xaa at (81) is Ala, Xaa is Gly
  MISC_FEATURE (84)..(84): Xaa is absent, or if Xaa at (81) is Ala, Xaa is Glu
  MISC_FEATURE (85)..(85): Xaa is absent, or if Xaa at (81) is Ala, Xaa is Pro
  MISC_FEATURE (86)..(86): Xaa is absent or Ala
  MISC_FEATURE (87)..(87): Xaa is absent, or if Xaa at (86) is Ala, Xaa is Gly
  MISC_FEATURE (88)..(88): Xaa is absent, or if Xaa at (86) is Ala, Xaa is Gly
  MISC_FEATURE (89)..(89): Xaa is absent, or if Xaa at (86) is Ala, Xaa is Glu
  MISC_FEATURE (90)..(90): Xaa is absent, or if Xaa at (86) is Ala, Xaa is Pro
  MISC_FEATURE (91)..(91): Xaa is absent or Ala
  MISC_FEATURE (92)..(92): Xaa is absent, or if Xaa at (91) is Ala, Xaa is Gly
  MISC_FEATURE (93)..(93): Xaa is absent, or if Xaa at (91) is Ala, Xaa is Gly
  MISC_FEATURE (94)..(94): Xaa is absent, or if Xaa at (91) is Ala, Xaa is Glu
  MISC_FEATURE (95)..(95): Xaa is absent, or if Xaa at (91) is Ala, Xaa is Pro
  MISC_FEATURE (96)..(96): Xaa is absent or Ala
  MISC_FEATURE (97)..(97): Xaa is absent, or if Xaa at (96) is Ala, Xaa is Gly
  MISC_FEATURE (98)..(98): Xaa is absent, or if Xaa at (96) is Ala, Xaa is Gly
  MISC_FEATURE (99)..(99): Xaa is absent, or if Xaa at (96) is Ala, Xaa is Glu
  MISC_FEATURE (100)..(100): Xaa is absent, or if Xaa at (96) is Ala, Xaa is Pro
AGGEPAGGEPXXXXXXXXXXXXXXXXXXXXXXXXXXXXXXXXXXXXXXXXXXXXXXXXXXXXXXXXXXXXXXXXXXXXXXXXXXXXXXXXXXXXXXXXXXG

SEQ ID NO: 551 - protein, 100 aa, Artificial Sequence
  Linker
  MISC_FEATURE (11)..(11): Xaa is absent or Ala
  MISC_FEATURE (12)..(12): Xaa is absent, or if Xaa at (11) is Ala, Xaa is Gly
  MISC_FEATURE (13)..(13): Xaa is absent, or if Xaa at (11) is Ala, Xaa is Ser
  MISC_FEATURE (14)..(14): Xaa is absent, or if Xaa at (11) is Ala, Xaa is Glu
  MISC_FEATURE (15)..(15): Xaa is absent, or if Xaa at (11) is Ala, Xaa is Pro
  MISC_FEATURE (16)..(16): Xaa is absent or Ala
  MISC_FEATURE (17)..(17): Xaa is absent, or if Xaa at (16) is Ala, Xaa is Gly
  MISC_FEATURE (18)..(18): Xaa is absent, or if Xaa at (16) is Ala, Xaa is Ser
  MISC_FEATURE (19)..(19): Xaa is absent, or if Xaa at (16) is Ala, Xaa is Glu
  MISC_FEATURE (20)..(20): Xaa is absent, or if Xaa at (16) is Ala, Xaa is Pro
  MISC_FEATURE (21)..(21): Xaa is absent or Ala
  MISC_FEATURE (22)..(22): Xaa is absent, or if Xaa at (21) is Ala, Xaa is Gly
  MISC_FEATURE (23)..(23): Xaa is absent, or if Xaa at (21) is Ala, Xaa is Ser
  MISC_FEATURE (24)..(24): Xaa is absent, or if Xaa at (21) is Ala, Xaa is Glu
  MISC_FEATURE (25)..(25): Xaa is absent, or if Xaa at (21) is Ala, Xaa is Pro
  MISC_FEATURE (26)..(26): Xaa is absent or Ala
  MISC_FEATURE (27)..(27): Xaa is absent, or if Xaa at (26) is Ala, Xaa is Gly
  MISC_FEATURE (28)..(28): Xaa is absent, or if Xaa at (26) is Ala, Xaa is Ser
  MISC_FEATURE (29)..(29): Xaa is absent, or if Xaa at (26) is Ala, Xaa is Glu
  MISC_FEATURE (30)..(30): Xaa is absent, or if Xaa at (26) is Ala, Xaa is Pro
  MISC_FEATURE (31)..(31): Xaa is absent or Ala
  MISC_FEATURE (32)..(32): Xaa is absent, or if Xaa at (31) is Ala, Xaa is Gly
  MISC_FEATURE (33)..(33): Xaa is absent, or if Xaa at (31) is Ala, Xaa is Ser
  MISC_FEATURE (34)..(34): Xaa is absent, or if Xaa at (31) is Ala, Xaa is Glu
  MISC_FEATURE (35)..(35): Xaa is absent, or if Xaa at (31) is Ala, Xaa is Pro
  MISC_FEATURE (36)..(36): Xaa is absent or Ala
  MISC_FEATURE (37)..(37): Xaa is absent, or if Xaa at (36) is Ala, Xaa is Gly
  MISC_FEATURE (38)..(38): Xaa is absent, or if Xaa at (36) is Ala, Xaa is Ser
  MISC_FEATURE (39)..(39): Xaa is absent, or if Xaa at (36) is Ala, Xaa is Glu
  MISC_FEATURE (40)..(40): Xaa is absent, or if Xaa at (36) is Ala, Xaa is Pro
  MISC_FEATURE (41)..(41): Xaa is absent or Ala
  MISC_FEATURE (42)..(42): Xaa is absent, or if Xaa at (41) is Ala, Xaa is Gly
  MISC_FEATURE (43)..(43): Xaa is absent, or if Xaa at (41) is Ala, Xaa is Ser
  MISC_FEATURE (44)..(44): Xaa is absent, or if Xaa at (41) is Ala, Xaa is Glu
  MISC_FEATURE (45)..(45): Xaa is absent, or if Xaa at (41) is Ala, Xaa is Pro
  MISC_FEATURE (46)..(46): Xaa is absent or Ala
  MISC_FEATURE (47)..(47): Xaa is absent, or if Xaa at (46) is Ala, Xaa is Gly
  MISC_FEATURE (48)..(48): Xaa is absent, or if Xaa at (46) is Ala, Xaa is Ser
  MISC_FEATURE (49)..(49): Xaa is absent, or if Xaa at (46) is Ala, Xaa is Glu
  MISC_FEATURE (50)..(50): Xaa is absent, or if Xaa at (46) is Ala, Xaa is Pro
  MISC_FEATURE (51)..(51): Xaa is absent or Ala
  MISC_FEATURE (52)..(52): Xaa is absent, or if Xaa at (51) is Ala, Xaa is Gly
  MISC_FEATURE (53)..(53): Xaa is absent, or if Xaa at (51) is Ala, Xaa is Ser
  MISC_FEATURE (54)..(54): Xaa is absent, or if Xaa at (51) is Ala, Xaa is Glu
  MISC_FEATURE (55)..(55): Xaa is absent, or if Xaa at (51) is Ala, Xaa is Pro
  MISC_FEATURE (56)..(56): Xaa is absent or Ala
  MISC_FEATURE (57)..(57): Xaa is absent, or if Xaa at (56) is Ala, Xaa is Gly
  MISC_FEATURE (58)..(58): Xaa is absent, or if Xaa at (56) is Ala, Xaa is Ser
  MISC_FEATURE (59)..(59): Xaa is absent, or if Xaa at (56) is Ala, Xaa is Glu
  MISC_FEATURE (60)..(60): Xaa is absent, or if Xaa at (56) is Ala, Xaa is Pro
  MISC_FEATURE (61)..(61): Xaa is absent or Ala
  MISC_FEATURE (62)..(62): Xaa is absent, or if Xaa at (61) is Ala, Xaa is Gly
  MISC_FEATURE (63)..(63): Xaa is absent, or if Xaa at (61) is Ala, Xaa is Ser
  MISC_FEATURE (64)..(64): Xaa is absent, or if Xaa at (61) is Ala, Xaa is Glu
  MISC_FEATURE (65)..(65): Xaa is absent, or if Xaa at (61) is Ala, Xaa is Pro
  MISC_FEATURE (66)..(66): Xaa is absent or Ala
  MISC_FEATURE (67)..(67): Xaa is absent, or if Xaa at (66) is Ala, Xaa is Gly
  MISC_FEATURE (68)..(68): Xaa is absent, or if Xaa at (66) is Ala, Xaa is Ser
  MISC_FEATURE (69)..(69): Xaa is absent, or if Xaa at (66) is Ala, Xaa is Glu
  MISC_FEATURE (70)..(70): Xaa is absent, or if Xaa at (66) is Ala, Xaa is Pro
  MISC_FEATURE (71)..(71): Xaa is absent or Ala
  MISC_FEATURE (72)..(72): Xaa is absent, or if Xaa at (71) is Ala, Xaa is Gly
  MISC_FEATURE (73)..(73): Xaa is absent, or if Xaa at (71) is Ala, Xaa is Ser
  MISC_FEATURE (74)..(74): Xaa is absent, or if Xaa at (71) is Ala, Xaa is Glu
  MISC_FEATURE (75)..(75): Xaa is absent, or if Xaa at (71) is Ala, Xaa is Pro
  MISC_FEATURE (76)..(76): Xaa is absent or Ala
  MISC_FEATURE (77)..(77): Xaa is absent, or if Xaa at (76) is Ala, Xaa is Gly
  MISC_FEATURE (78)..(78): Xaa is absent, or if Xaa at (76) is Ala, Xaa is Ser
  MISC_FEATURE (79)..(79): Xaa is absent, or if Xaa at (76) is Ala, Xaa is Glu
  MISC_FEATURE (80)..(80): Xaa is absent, or if Xaa at (76) is Ala, Xaa is Pro
  MISC_FEATURE (81)..(81): Xaa is absent or Ala
  MISC_FEATURE (82)..(82): Xaa is absent, or if Xaa at (81) is Ala, Xaa is Gly
  MISC_FEATURE (83)..(83): Xaa is absent, or if Xaa at (81) is Ala, Xaa is Ser
  MISC_FEATURE (84)..(84): Xaa is absent, or if Xaa at (81) is Ala, Xaa is Glu
  MISC_FEATURE (85)..(85): Xaa is absent, or if Xaa at (81) is Ala, Xaa is Pro
  MISC_FEATURE (86)..(86): Xaa is absent or Ala
  MISC_FEATURE (87)..(87): Xaa is absent, or if Xaa at (86) is Ala, Xaa is Gly
  MISC_FEATURE (88)..(88): Xaa is absent, or if Xaa at (86) is Ala, Xaa is Ser
  MISC_FEATURE (89)..(89): Xaa is absent, or if Xaa at (86) is Ala, Xaa is Glu
  MISC_FEATURE (90)..(90): Xaa is absent, or if Xaa at (86) is Ala, Xaa is Pro
  MISC_FEATURE (91)..(91): Xaa is absent or Ala
  MISC_FEATURE (92)..(92): Xaa is absent, or if Xaa at (91) is Ala, Xaa is Gly
  MISC_FEATURE (93)..(93): Xaa is absent, or if Xaa at (91) is Ala, Xaa is Ser
  MISC_FEATURE (94)..(94): Xaa is absent, or if Xaa at (91) is Ala, Xaa is Glu
  MISC_FEATURE (95)..(95): Xaa is absent, or if Xaa at (91) is Ala, Xaa is Pro
  MISC_FEATURE (96)..(96): Xaa is absent or Ala
  MISC_FEATURE (97)..(97): Xaa is absent, or if Xaa at (96) is Ala, Xaa is Gly
  MISC_FEATURE (98)..(98): Xaa is absent, or if Xaa at (96) is Ala, Xaa is Ser
  MISC_FEATURE (99)..(99): Xaa is absent, or if Xaa at (96) is Ala, Xaa is Glu
  MISC_FEATURE (100)..(100): Xaa is absent, or if Xaa at (96) is Ala, Xaa is Pro
AGSEPAGSEPXXXXXXXXXXXXXXXXXXXXXXXXXXXXXXXXXXXXXXXXXXXXXXXXXXXXXXXXXXXXXXXXXXXXXXXXXXXXXXXXXXXXXXXXXX

SEQ ID NO: 552 - protein, 101 aa, Artificial Sequence
  Linker
  MISC_FEATURE (11)..(11): Xaa is absent or Ala
  MISC_FEATURE (12)..(12): Xaa is absent, or if Xaa at (11) is Ala, Xaa is Gly
  MISC_FEATURE (13)..(13): Xaa is absent, or if Xaa at (11) is Ala, Xaa is Ser
  MISC_FEATURE (14)..(14): Xaa is absent, or if Xaa at (11) is Ala, Xaa is Glu
  MISC_FEATURE (15)..(15): Xaa is absent, or if Xaa at (11) is Ala, Xaa is Pro
  MISC_FEATURE (16)..(16): Xaa is absent or Ala
  MISC_FEATURE (17)..(17): Xaa is absent, or if Xaa at (16) is Ala, Xaa is Gly
  MISC_FEATURE (18)..(18): Xaa is absent, or if Xaa at (16) is Ala, Xaa is Ser
  MISC_FEATURE (19)..(19): Xaa is absent, or if Xaa at (16) is Ala, Xaa is Glu
  MISC_FEATURE (20)..(20): Xaa is absent, or if Xaa at (16) is Ala, Xaa is Pro
  MISC_FEATURE (21)..(21): Xaa is absent or Ala
  MISC_FEATURE (22)..(22): Xaa is absent, or if Xaa at (21) is Ala, Xaa is Gly
  MISC_FEATURE (23)..(23): Xaa is absent, or if Xaa at (21) is Ala, Xaa is Ser
  MISC_FEATURE (24)..(24): Xaa is absent, or if Xaa at (21) is Ala, Xaa is Glu
  MISC_FEATURE (25)..(25): Xaa is absent, or if Xaa at (21) is Ala, Xaa is Pro
  MISC_FEATURE (26)..(26): Xaa is absent or Ala
  MISC_FEATURE (27)..(27): Xaa is absent, or if Xaa at (26) is Ala, Xaa is Gly
  MISC_FEATURE (28)..(28): Xaa is absent, or if Xaa at (26) is Ala, Xaa is Ser
  MISC_FEATURE (29)..(29): Xaa is absent, or if Xaa at (26) is Ala, Xaa is Glu
  MISC_FEATURE (30)..(30): Xaa is absent, or if Xaa at (26) is Ala, Xaa is Pro
  MISC_FEATURE (31)..(31): Xaa is absent or Ala
  MISC_FEATURE (32)..(32): Xaa is absent, or if Xaa at (31) is Ala, Xaa is Gly
  MISC_FEATURE (33)..(33): Xaa is absent, or if Xaa at (31) is Ala, Xaa is Ser
  MISC_FEATURE (34)..(34): Xaa is absent, or if Xaa at (31) is Ala, Xaa is Glu
  MISC_FEATURE (35)..(35): Xaa is absent, or if Xaa at (31) is Ala, Xaa is Pro
  MISC_FEATURE (36)..(36): Xaa is absent or Ala
  MISC_FEATURE (37)..(37): Xaa is absent, or if Xaa at (36) is Ala, Xaa is Gly
  MISC_FEATURE (38)..(38): Xaa is absent, or if Xaa at (36) is Ala, Xaa is Ser
  MISC_FEATURE (39)..(39): Xaa is absent, or if Xaa at (36) is Ala, Xaa is Glu
  MISC_FEATURE (40)..(40): Xaa is absent, or if Xaa at (36) is Ala, Xaa is Pro
  MISC_FEATURE (41)..(41): Xaa is absent or Ala
  MISC_FEATURE (42)..(42): Xaa is absent, or if Xaa at (41) is Ala, Xaa is Gly
  MISC_FEATURE (43)..(43): Xaa is absent, or if Xaa at (41) is Ala, Xaa is Ser
  MISC_FEATURE (44)..(44): Xaa is absent, or if Xaa at (41) is Ala, Xaa is Glu
  MISC_FEATURE (45)..(45): Xaa is absent, or if Xaa at (41) is Ala, Xaa is Pro
  MISC_FEATURE (46)..(46): Xaa is absent or Ala
  MISC_FEATURE (47)..(47): Xaa is absent, or if Xaa at (46) is Ala, Xaa is Gly
  MISC_FEATURE (48)..(48): Xaa is absent, or if Xaa at (46) is Ala, Xaa is Ser
  MISC_FEATURE (49)..(49): Xaa is absent, or if Xaa at (46) is Ala, Xaa is Glu
  MISC_FEATURE (50)..(50): Xaa is absent, or if Xaa at (46) is Ala, Xaa is Pro
  MISC_FEATURE (51)..(51): Xaa is absent or Ala
  MISC_FEATURE (52)..(52): Xaa is absent, or if Xaa at (51) is Ala, Xaa is Gly
  MISC_FEATURE (53)..(53): Xaa is absent, or if Xaa at (51) is Ala, Xaa is Ser
  MISC_FEATURE (54)..(54): Xaa is absent, or if Xaa at (51) is Ala, Xaa is Glu
  MISC_FEATURE (55)..(55): Xaa is absent, or if Xaa at (51) is Ala, Xaa is Pro
  MISC_FEATURE (56)..(56): Xaa is absent or Ala
  MISC_FEATURE (57)..(57): Xaa is absent, or if Xaa at (56) is Ala, Xaa is Gly
  MISC_FEATURE (58)..(58): Xaa is absent, or if Xaa at (56) is Ala, Xaa is Ser
  MISC_FEATURE (59)..(59): Xaa is absent, or if Xaa at (56) is Ala, Xaa is Glu
  MISC_FEATURE (60)..(60): Xaa is absent, or if Xaa at (56) is Ala, Xaa is Pro
  MISC_FEATURE (61)..(61): Xaa is absent or Ala
  MISC_FEATURE (62)..(62): Xaa is absent, or if Xaa at (61) is Ala, Xaa is Gly
  MISC_FEATURE (63)..(63): Xaa is absent, or if Xaa at (61) is Ala, Xaa is Ser
  MISC_FEATURE (64)..(64): Xaa is absent, or if Xaa at (61) is Ala, Xaa is Glu
  MISC_FEATURE (65)..(65): Xaa is absent, or if Xaa at (61) is Ala, Xaa is Pro
  MISC_FEATURE (66)..(66): Xaa is absent or Ala
  MISC_FEATURE (67)..(67): Xaa is absent, or if Xaa at (66) is Ala, Xaa is Gly
  MISC_FEATURE (68)..(68): Xaa is absent, or if Xaa at (66) is Ala, Xaa is Ser
  MISC_FEATURE (69)..(69): Xaa is absent, or if Xaa at (66) is Ala, Xaa is Glu
  MISC_FEATURE (70)..(70): Xaa is absent, or if Xaa at (66) is Ala, Xaa is Pro
  MISC_FEATURE (71)..(71): Xaa is absent or Ala
  MISC_FEATURE (72)..(72): Xaa is absent, or if Xaa at (71) is Ala, Xaa is Gly
  MISC_FEATURE (73)..(73): Xaa is absent, or if Xaa at (71) is Ala, Xaa is Ser
  MISC_FEATURE (74)..(74): Xaa is absent, or if Xaa at (71) is Ala, Xaa is Glu
  MISC_FEATURE (75)..(75): Xaa is absent, or if Xaa at (71) is Ala, Xaa is Pro
  MISC_FEATURE (76)..(76): Xaa is absent or Ala
  MISC_FEATURE (77)..(77): Xaa is absent, or if Xaa at (76) is Ala, Xaa is Gly
  MISC_FEATURE (78)..(78): Xaa is absent, or if Xaa at (76) is Ala, Xaa is Ser
  MISC_FEATURE (79)..(79): Xaa is absent, or if Xaa at (76) is Ala, Xaa is Glu
  MISC_FEATURE (80)..(80): Xaa is absent, or if Xaa at (76) is Ala, Xaa is Pro
  MISC_FEATURE (81)..(81): Xaa is absent or Ala
  MISC_FEATURE (82)..(82): Xaa is absent, or if Xaa at (81) is Ala, Xaa is Gly
  MISC_FEATURE (83)..(83): Xaa is absent, or if Xaa at (81) is Ala, Xaa is Ser
  MISC_FEATURE (84)..(84): Xaa is absent, or if Xaa at (81) is Ala, Xaa is Glu
  MISC_FEATURE (85)..(85): Xaa is absent, or if Xaa at (81) is Ala, Xaa is Pro
  MISC_FEATURE (86)..(86): Xaa is absent or Ala
  MISC_FEATURE (87)..(87): Xaa is absent, or if Xaa at (86) is Ala, Xaa is Gly
  MISC_FEATURE (88)..(88): Xaa is absent, or if Xaa at (86) is Ala, Xaa is Ser
  MISC_FEATURE (89)..(89): Xaa is absent, or if Xaa at (86) is Ala, Xaa is Glu
  MISC_FEATURE (90)..(90): Xaa is absent, or if Xaa at (86) is Ala, Xaa is Pro
  MISC_FEATURE (91)..(91): Xaa is absent or Ala
  MISC_FEATURE (92)..(92): Xaa is absent, or if Xaa at (91) is Ala, Xaa is Gly
  MISC_FEATURE (93)..(93): Xaa is absent, or if Xaa at (91) is Ala, Xaa is Ser
  MISC_FEATURE (94)..(94): Xaa is absent, or if Xaa at (91) is Ala, Xaa is Glu
  MISC_FEATURE (95)..(95): Xaa is absent, or if Xaa at (91) is Ala, Xaa is Pro
  MISC_FEATURE (96)..(96): Xaa is absent or Ala
  MISC_FEATURE (97)..(97): Xaa is absent, or if Xaa at (96) is Ala, Xaa is Gly
  MISC_FEATURE (98)..(98): Xaa is absent, or if Xaa at (96) is Ala, Xaa is Ser
  MISC_FEATURE (99)..(99): Xaa is absent, or if Xaa at (96) is Ala, Xaa is Glu
  MISC_FEATURE (100)..(100): Xaa is absent, or if Xaa at (96) is Ala, Xaa is Pro
AGSEPAGSEPXXXXXXXXXXXXXXXXXXXXXXXXXXXXXXXXXXXXXXXXXXXXXXXXXXXXXXXXXXXXXXXXXXXXXXXXXXXXXXXXXXXXXXXXXXG

SEQ ID NO: 553 - protein, 100 aa, Artificial Sequence
  Linker
  MISC_FEATURE (11)..(11): Xaa is absent or Gly
  MISC_FEATURE (12)..(12): Xaa is absent, or if Xaa at (11) is Gly, Xaa is Gly
  MISC_FEATURE (13)..(13): Xaa is absent, or if Xaa at (11) is Gly, Xaa is Gly
  MISC_FEATURE (14)..(14): Xaa is absent, or if Xaa at (11) is Gly, Xaa is Glu
  MISC_FEATURE (15)..(15): Xaa is absent, or if Xaa at (11) is Gly, Xaa is Gln
  MISC_FEATURE (16)..(16): Xaa is absent or Gly
  MISC_FEATURE (17)..(17): Xaa is absent, or if Xaa at (16) is Gly, Xaa is Gly
  MISC_FEATURE (18)..(18): Xaa is absent, or if Xaa at (16) is Gly, Xaa is Gly
  MISC_FEATURE (19)..(19): Xaa is absent, or if Xaa at (16) is Gly, Xaa is Glu
  MISC_FEATURE (20)..(20): Xaa is absent, or if Xaa at (16) is Gly, Xaa is Gln
  MISC_FEATURE (21)..(21): Xaa is absent or Gly
  MISC_FEATURE (22)..(22): Xaa is absent, or if Xaa at (21) is Gly, Xaa is Gly
  MISC_FEATURE (23)..(23): Xaa is absent, or if Xaa at (21) is Gly, Xaa is Gly
  MISC_FEATURE (24)..(24): Xaa is absent, or if Xaa at (21) is Gly, Xaa is Glu
  MISC_FEATURE (25)..(25): Xaa is absent, or if Xaa at (21) is Gly, Xaa is Gln
  MISC_FEATURE (26)..(26): Xaa is absent or Gly
  MISC_FEATURE (27)..(27): Xaa is absent, or if Xaa at (26) is Gly, Xaa is Gly
  MISC_FEATURE (28)..(28): Xaa is absent, or if Xaa at (26) is Gly, Xaa is Gly
  MISC_FEATURE (29)..(29): Xaa is absent, or if Xaa at (26) is Gly, Xaa is Glu
  MISC_FEATURE (30)..(30): Xaa is absent, or if Xaa at (26) is Gly, Xaa is Gln
  MISC_FEATURE (31)..(31): Xaa is absent or Gly
  MISC_FEATURE (32)..(32): Xaa is absent, or if Xaa at (31) is Gly, Xaa is Gly
  MISC_FEATURE (33)..(33): Xaa is absent, or if Xaa at (31) is Gly, Xaa is Gly
  MISC_FEATURE (34)..(34): Xaa is absent, or if Xaa at (31) is Gly, Xaa is Glu
  MISC_FEATURE (35)..(35): Xaa is absent, or if Xaa at (31) is Gly, Xaa is Gln
  MISC_FEATURE (36)..(36): Xaa is absent or Gly
  MISC_FEATURE (37)..(37): Xaa is absent, or if Xaa at (36) is Gly, Xaa is Gly
  MISC_FEATURE (38)..(38): Xaa is absent, or if Xaa at (36) is Gly, Xaa is Gly
  MISC_FEATURE (39)..(39): Xaa is absent, or if Xaa at (36) is Gly, Xaa is Glu
  MISC_FEATURE (40)..(40): Xaa is absent, or if Xaa at (36) is Gly, Xaa is Gln
  MISC_FEATURE (41)..(41): Xaa is absent or Gly
  MISC_FEATURE (42)..(42): Xaa is absent, or if Xaa at (41) is Gly, Xaa is Gly
  MISC_FEATURE (43)..(43): Xaa is absent, or if Xaa at (41) is Gly, Xaa is Gly
  MISC_FEATURE (44)..(44): Xaa is absent, or if Xaa at (41) is Gly, Xaa is Glu
  MISC_FEATURE (45)..(45): Xaa is absent, or if Xaa at (41) is Gly, Xaa is Gln
  MISC_FEATURE (46)..(46): Xaa is absent or Gly
  MISC_FEATURE (47)..(47): Xaa is absent, or if Xaa at (46) is Gly, Xaa is Gly
  MISC_FEATURE (48)..(48): Xaa is absent, or if Xaa at (46) is Gly, Xaa is Gly
  MISC_FEATURE (49)..(49): Xaa is absent, or if Xaa at (46) is Gly, Xaa is Glu
  MISC_FEATURE (50)..(50): Xaa is absent, or if Xaa at (46) is Gly, Xaa is Gln
  MISC_FEATURE (51)..(51): Xaa is absent or Gly
  MISC_FEATURE (52)..(52): Xaa is absent, or if Xaa at (51) is Gly, Xaa is Gly
  MISC_FEATURE (53)..(53): Xaa is absent, or if Xaa at (51) is Gly, Xaa is Gly
  MISC_FEATURE (54)..(54): Xaa is absent, or if Xaa at (51) is Gly, Xaa is Glu
  MISC_FEATURE (55)..(55): Xaa is absent, or if Xaa at (51) is Gly, Xaa is Gln
  MISC_FEATURE (56)..(56): Xaa is absent or Gly
  MISC_FEATURE (57)..(57): Xaa is absent, or if Xaa at (56) is Gly, Xaa is Gly
  MISC_FEATURE (58)..(58): Xaa is absent, or if Xaa at (56) is Gly, Xaa is Gly
  MISC_FEATURE (59)..(59): Xaa is absent, or if Xaa at (56) is Gly, Xaa is Glu
  MISC_FEATURE (60)..(60): Xaa is absent, or if Xaa at (56) is Gly, Xaa is Gln
  MISC_FEATURE (61)..(61): Xaa is absent or Gly
  MISC_FEATURE (62)..(62): Xaa is absent, or if Xaa at (61) is Gly, Xaa is Gly
  MISC_FEATURE (63)..(63): Xaa is absent, or if Xaa at (61) is Gly, Xaa is Gly
  MISC_FEATURE (64)..(64): Xaa is absent, or if Xaa at (61) is Gly, Xaa is Glu
  MISC_FEATURE (65)..(65): Xaa is absent, or if Xaa at (61) is Gly, Xaa is Gln
  MISC_FEATURE (66)..(66): Xaa is absent or Gly
  MISC_FEATURE (67)..(67): Xaa is absent, or if Xaa at (66) is Gly, Xaa is Gly
  MISC_FEATURE (68)..(68): Xaa is absent, or if Xaa at (66) is Gly, Xaa is Gly
  MISC_FEATURE (69)..(69): Xaa is absent, or if Xaa at (66) is Gly, Xaa is Glu
  MISC_FEATURE (70)..(70): Xaa is absent, or if Xaa at (66) is Gly, Xaa is Gln
  MISC_FEATURE (71)..(71): Xaa is absent or Gly
  MISC_FEATURE (72)..(72): Xaa is absent, or if Xaa at (71) is Gly, Xaa is Gly
  MISC_FEATURE (73)..(73): Xaa is absent, or if Xaa at (71) is Gly, Xaa is Gly
  MISC_FEATURE (74)..(74): Xaa is absent, or if Xaa at (71) is Gly, Xaa is Glu
  MISC_FEATURE (75)..(75): Xaa is absent, or if Xaa at (71) is Gly, Xaa is Gln
  MISC_FEATURE (76)..(76): Xaa is absent or Gly
  MISC_FEATURE (77)..(77): Xaa is absent, or if Xaa at (76) is Gly, Xaa is Gly
  MISC_FEATURE (78)..(78): Xaa is absent, or if Xaa at (76) is Gly, Xaa is Gly
  MISC_FEATURE (79)..(79): Xaa is absent, or if Xaa at (76) is Gly, Xaa is Glu
  MISC_FEATURE (80)..(80): Xaa is absent, or if Xaa at (76) is Gly, Xaa is Gln
  MISC_FEATURE (81)..(81): Xaa is absent or Gly
  MISC_FEATURE (82)..(82): Xaa is absent, or if Xaa at (81) is Gly, Xaa is Gly
  MISC_FEATURE (83)..(83): Xaa is absent, or if Xaa at (81) is Gly, Xaa is Gly
  MISC_FEATURE (84)..(84): Xaa is absent, or if Xaa at (81) is Gly, Xaa is Glu
  MISC_FEATURE (85)..(85): Xaa is absent, or if Xaa at (81) is Gly, Xaa is Gln
  MISC_FEATURE (86)..(86): Xaa is absent or Gly
  MISC_FEATURE (87)..(87): Xaa is absent, or if Xaa at (86) is Gly, Xaa is Gly
  MISC_FEATURE (88)..(88): Xaa is absent, or if Xaa at (86) is Gly, Xaa is Gly
  MISC_FEATURE (89)..(89): Xaa is absent, or if Xaa at (86) is Gly, Xaa is Glu
  MISC_FEATURE (90)..(90): Xaa is absent, or if Xaa at (86) is Gly, Xaa is Gln
  MISC_FEATURE (91)..(91): Xaa is absent or Gly
  MISC_FEATURE (92)..(92): Xaa is absent, or if Xaa at (91) is Gly, Xaa is Gly
  MISC_FEATURE (93)..(93): Xaa is absent, or if Xaa at (91) is Gly, Xaa is Gly
  MISC_FEATURE (94)..(94): Xaa is absent, or if Xaa at (91) is Gly, Xaa is Glu
  MISC_FEATURE (95)..(95): Xaa is absent, or if Xaa at (91) is Gly, Xaa is Gln
  MISC_FEATURE (96)..(96): Xaa is absent or Gly
  MISC_FEATURE (97)..(97): Xaa is absent, or if Xaa at (96) is Gly, Xaa is Gly
  MISC_FEATURE (98)..(98): Xaa is absent, or if Xaa at (96) is Gly, Xaa is Gly
  MISC_FEATURE (99)..(99): Xaa is absent, or if Xaa at (96) is Gly, Xaa is Glu
  MISC_FEATURE (100)..(100): Xaa is absent, or if Xaa at (96) is Gly, Xaa is Gln
GGGEQGGGEQXXXXXXXXXXXXXXXXXXXXXXXXXXXXXXXXXXXXXXXXXXXXXXXXXXXXXXXXXXXXXXXXXXXXXXXXXXXXXXXXXXXXXXXXXX

SEQ ID NO: 554 - protein, 101 aa, Artificial Sequence
  Linker
  MISC_FEATURE (11)..(11): Xaa is absent or Gly
  MISC_FEATURE (12)..(12): Xaa is absent, or if Xaa at (11) is Gly, Xaa is Gly
  MISC_FEATURE (13)..(13): Xaa is absent, or if Xaa at (11) is Gly, Xaa is Gly
  MISC_FEATURE (14)..(14): Xaa is absent, or if Xaa at (11) is Gly, Xaa is Glu
  MISC_FEATURE (15)..(15): Xaa is absent, or if Xaa at (11) is Gly, Xaa is Gln
  MISC_FEATURE (16)..(16): Xaa is absent or Gly
  MISC_FEATURE (17)..(17): Xaa is absent, or if Xaa at (16) is Gly, Xaa is Gly
  MISC_FEATURE (18)..(18): Xaa is absent, or if Xaa at (16) is Gly, Xaa is Gly
  MISC_FEATURE (19)..(19): Xaa is absent, or if Xaa at (16) is Gly, Xaa is Glu
  MISC_FEATURE (20)..(20): Xaa is absent, or if Xaa at (16) is Gly, Xaa is Gln
  MISC_FEATURE (21)..(21): Xaa is absent or Gly
  MISC_FEATURE (22)..(22): Xaa is absent, or if Xaa at (21) is Gly, Xaa is Gly
  MISC_FEATURE (23)..(23): Xaa is absent, or if Xaa at (21) is Gly, Xaa is Gly
  MISC_FEATURE (24)..(24): Xaa is absent, or if Xaa at (21) is Gly, Xaa is Glu
  MISC_FEATURE (25)..(25): Xaa is absent, or if Xaa at (21) is Gly, Xaa is Gln
  MISC_FEATURE (26)..(26): Xaa is absent or Gly
  MISC_FEATURE (27)..(27): Xaa is absent, or if Xaa at (26) is Gly, Xaa is Gly
  MISC_FEATURE (28)..(28): Xaa is absent, or if Xaa at (26) is Gly, Xaa is Gly
  MISC_FEATURE (29)..(29): Xaa is absent, or if Xaa at (26) is Gly, Xaa is Glu
  MISC_FEATURE (30)..(30): Xaa is absent, or if Xaa at (26) is Gly, Xaa is Gln
  MISC_FEATURE (31)..(31): Xaa is absent or Gly
  MISC_FEATURE (32)..(32): Xaa is absent, or if Xaa at (31) is Gly, Xaa is Gly
  MISC_FEATURE (33)..(33): Xaa is absent, or if Xaa at (31) is Gly, Xaa is Gly
  MISC_FEATURE (34)..(34): Xaa is absent, or if Xaa at (31) is Gly, Xaa is Glu
  MISC_FEATURE (35)..(35): Xaa is absent, or if Xaa at (31) is Gly, Xaa is Gln
  MISC_FEATURE (36)..(36): Xaa is absent or Gly
  MISC_FEATURE (37)..(37): Xaa is absent, or if Xaa at (36) is Gly, Xaa is Gly
  MISC_FEATURE (38)..(38): Xaa is absent, or if Xaa at (36) is Gly, Xaa is Gly
  MISC_FEATURE (39)..(39): Xaa is absent, or if Xaa at (36) is Gly, Xaa is Glu
  MISC_FEATURE (40)..(40): Xaa is absent, or if Xaa at (36) is Gly, Xaa is Gln
  MISC_FEATURE (41)..(41): Xaa is absent or Gly
  MISC_FEATURE (42)..(42): Xaa is absent, or if Xaa at (41) is Gly, Xaa is Gly
  MISC_FEATURE (43)..(43): Xaa is absent, or if Xaa at (41) is Gly, Xaa is Gly
  MISC_FEATURE (44)..(44): Xaa is absent, or if Xaa at (41) is Gly, Xaa is Glu
  MISC_FEATURE (45)..(45): Xaa is absent, or if Xaa at (41) is Gly, Xaa is Gln
  MISC_FEATURE (46)..(46): Xaa is absent or Gly
  MISC_FEATURE (47)..(47): Xaa is absent, or if Xaa at (46) is Gly, Xaa is Gly
  MISC_FEATURE (48)..(48): Xaa is absent, or if Xaa at (46) is Gly, Xaa is Gly
  MISC_FEATURE (49)..(49): Xaa is absent, or if Xaa at (46) is Gly, Xaa is Glu
  MISC_FEATURE (50)..(50): Xaa is absent, or if Xaa at (46) is Gly, Xaa is Gln
  MISC_FEATURE (51)..(51): Xaa is absent or Gly
  MISC_FEATURE (52)..(52): Xaa is absent, or if Xaa at (51) is Gly, Xaa is Gly
  MISC_FEATURE (53)..(53): Xaa is absent, or if Xaa at (51) is Gly, Xaa is Gly
  MISC_FEATURE (54)..(54): Xaa is absent, or if Xaa at (51) is Gly, Xaa is Glu
  MISC_FEATURE (55)..(55): Xaa is absent, or if Xaa at (51) is Gly, Xaa is Gln
  MISC_FEATURE (56)..(56): Xaa is absent or Gly
  MISC_FEATURE (57)..(57): Xaa is absent, or if Xaa at (56) is Gly, Xaa is Gly
  MISC_FEATURE (58)..(58): Xaa is absent, or if Xaa at (56) is Gly, Xaa is Gly
  MISC_FEATURE (59)..(59): Xaa is absent, or if Xaa at (56) is Gly, Xaa is Glu
  MISC_FEATURE (60)..(60): Xaa is absent, or if Xaa at (56) is Gly, Xaa is Gln
  MISC_FEATURE (61)..(61): Xaa is absent or Gly
  MISC_FEATURE (62)..(62): Xaa is absent, or if Xaa at (61) is Gly, Xaa is Gly
  MISC_FEATURE (63)..(63): Xaa is absent, or if Xaa at (61) is Gly, Xaa is Gly
  MISC_FEATURE (64)..(64): Xaa is absent, or if Xaa at (61) is Gly, Xaa is Glu
  MISC_FEATURE (65)..(65): Xaa is absent, or if Xaa at (61) is Gly, Xaa is Gln
  MISC_FEATURE (66)..(66): Xaa is absent or Gly
  MISC_FEATURE (67)..(67): Xaa is absent, or if Xaa at (66) is Gly, Xaa is Gly
  MISC_FEATURE (68)..(68): Xaa is absent, or if Xaa at (66) is Gly, Xaa is Gly
  MISC_FEATURE (69)..(69): Xaa is absent, or if Xaa at (66) is Gly, Xaa is Glu
  MISC_FEATURE (70)..(70): Xaa is absent, or if Xaa at (66) is Gly, Xaa is Gln
  MISC_FEATURE (71)..(71): Xaa is absent or Gly
  MISC_FEATURE (72)..(72): Xaa is absent, or if Xaa at (71) is Gly, Xaa is Gly
  MISC_FEATURE (73)..(73): Xaa is absent, or if Xaa at (71) is Gly, Xaa is Gly
  MISC_FEATURE (74)..(74): Xaa is absent, or if Xaa at (71) is Gly, Xaa is Glu
  MISC_FEATURE (75)..(75): Xaa is absent, or if Xaa at (71) is Gly, Xaa is Gln
  MISC_FEATURE (76)..(76): Xaa is absent or Gly
  MISC_FEATURE (77)..(77): Xaa is absent, or if Xaa at (76) is Gly, Xaa is Gly
  MISC_FEATURE (78)..(78): Xaa is absent, or if Xaa at (76) is Gly, Xaa is Gly
  MISC_FEATURE (79)..(79): Xaa is absent, or if Xaa at (76) is Gly, Xaa is Glu
  MISC_FEATURE (80)..(80): Xaa is absent, or if Xaa at (76) is Gly, Xaa is Gln
  MISC_FEATURE (81)..(81): Xaa is absent or Gly
  MISC_FEATURE (82)..(82): Xaa is absent, or if Xaa at (81) is Gly, Xaa is Gly
  MISC_FEATURE (83)..(83): Xaa is absent, or if Xaa at (81) is Gly, Xaa is Gly
  MISC_FEATURE (84)..(84): Xaa is absent, or if Xaa at (81) is Gly, Xaa is Glu
  MISC_FEATURE (85)..(85): Xaa is absent, or if Xaa at (81) is Gly, Xaa is Gln
  MISC_FEATURE (86)..(86): Xaa is absent or Gly
  MISC_FEATURE (87)..(87): Xaa is absent, or if Xaa at (86) is Gly, Xaa is Gly
  MISC_FEATURE (88)..(88): Xaa is absent, or if Xaa at (86) is Gly, Xaa is Gly
  MISC_FEATURE (89)..(89): Xaa is absent, or if Xaa at (86) is Gly, Xaa is Glu
  MISC_FEATURE (90)..(90): Xaa is absent, or if Xaa at (86) is Gly, Xaa is Gln
  MISC_FEATURE (91)..(91): Xaa is absent or Gly
  MISC_FEATURE (92)..(92): Xaa is absent, or if Xaa at (91) is Gly, Xaa is Gly
  MISC_FEATURE (93)..(93): Xaa is absent, or if Xaa at (91) is Gly, Xaa is Gly
  MISC_FEATURE (94)..(94): Xaa is absent, or if Xaa at (91) is Gly, Xaa is Glu
  MISC_FEATURE (95)..(95): Xaa is absent, or if Xaa at (91) is Gly, Xaa is Gln
  MISC_FEATURE (96)..(96): Xaa is absent or Gly
  MISC_FEATURE (97)..(97): Xaa is absent, or if Xaa at (96) is Gly, Xaa is Gly
  MISC_FEATURE (98)..(98): Xaa is absent, or if Xaa at (96) is Gly, Xaa is Gly
  MISC_FEATURE (99)..(99): Xaa is absent, or if Xaa at (96) is Gly, Xaa is Glu
  MISC_FEATURE (100)..(100): Xaa is absent, or if Xaa at (96) is Gly, Xaa is Gln
GGGEQGGGEQXXXXXXXXXXXXXXXXXXXXXXXXXXXXXXXXXXXXXXXXXXXXXXXXXXXXXXXXXXXXXXXXXXXXXXXXXXXXXXXXXXXXXXXXXXG

SEQ ID NO: 555 - protein, 11 aa, Artificial Sequence
  Linker
ADAAPADAAPG

SEQ ID NO: 556 - protein, 11 aa, Artificial Sequence
  Linker
GEPQGGEPQGG

SEQ ID NO: 557 - protein, 11 aa, Artificial Sequence
  Linker
AGGEPAGGEPG

SEQ ID NO: 558 - protein, 11 aa, Artificial Sequence
  Linker
AGSEPAGSEPG

SEQ ID NO: 559 - protein, 11 aa, Artificial Sequence
  Linker
GGGEQGGGEQG
